(19) United States
(12) Patent Application Publication
(10) Pub. No.: US 2007/0134234 A1
(43) Pub. Date: Jun. 14, 2007

(54) Immunomodulatory compositions and uses therefor

(75) Inventors: Craig A. Smith, Seattle, WA (US); Steven Wiley, Seattle, WA (US); Ajamete Kaykas, Seattle, WA (US); Jalal Vakili, Seattle, WA (US); Peter Probst, Seattle, WA (US)

Correspondence Address: SEED INTELLECTUAL PROPERTY LAW GROUP PLLC, 701 FIFTH AVE, SUITE 5400, SEATTLE, WA, 98104, US

(73) Assignee: Viral Logic Systems Technology Corp., Seattle, WA (US)

(21) Appl. No.: 11/541,449

(22) Filed: Sep. 29, 2006

Related U.S. Application Data
(60) Provisional application No. 60/721,876, filed on Sep. 29, 2005.
(60) Provisional application No. 60/784,710, filed on Mar. 22, 2006.
(60) Provisional application No. 60/801,992, filed on May 19, 2006.

(51) Int. Cl. A61K 39/395; C07H 21/04; C12P 21/06; C07K 16/46; C12N 5/06; C12P 21/08

(52) U.S. Cl. 424/133.1; 424/178.1; 530/391.1; 435/69.1; 435/327; 435/320.1; 536/23.53

(57) ABSTRACT

The poxvirus proteins designated A41L and 130L bind to three receptor-like protein tyrosine phosphatases (RPTP), leukocyte common antigen related protein (LAR), RPTP-δ, and RPTP-σ, that are present on the cell surface of immune cells. When a host is infected with the poxvirus, binding of A41L to cell surface proteins on the host cells results in suppression of the immune response. The present invention provides agents such as antibodies, and antigen-binding fragments thereof, small molecules, aptamers, small interfering RNAs, and peptide-IgFc fusion polypeptides that interact with one or more of LAR, RPTP-δ, and RPTP-σ expressed by immune cells or interact with a polynucleotide encoding the RPTP. Also provided are RPTP Ig domain oligomers and Fc fusion polypeptides. Such agents are useful for treating an immunological disorder in a subject according to the methods described herein.

### CROSS-REFERENCE TO RELATED APPLICATIONS

[0001] This application claims the benefit of U.S. Provisional Application No. 60/721,876 filed Sep. 29, 2005; U.S. Provisional Application No. 60/784,710 filed Mar. 22, 2006; and U.S. Provisional Application No. 60/801,992 filed May 19, 2006, which are all incorporated herein by reference in their entireties.

### STATEMENT REGARDING SEQUENCE LISTING SUBMITTED ON CD-ROM

[0002] The Sequence Listing associated with this application is provided on CD-ROM in lieu of a paper copy, and is hereby incorporated by reference into the specification. Three CD-ROMs are provided, containing identical copies of the sequence listing: CD-ROM No. 1 is labeled COPY 1, contains the file seq_{—}930118_{—}401.app.txt which is 0.76 MB and created on Sep. 29, 2006; CD-ROM No. 2 is labeled COPY 2, contains the file seq_{—}930118_{—}401.app.txt which is 0.76 MB and created on Sep. 29, 2006; CD-ROM No. 3 is labeled CRF (Computer Readable Form), contains the file seq_{—}930118_{—}401.app.txt which is 0.76 MB and created on Sep. 29, 2006.

### BACKGROUND OF THE INVENTION

[0003] 1. Field of the Invention

[0004] The present invention provides agents that affect the function of one or more of three receptor-like protein tyrosine phosphatases (RPTP), leukocyte common antigen related protein (LAR), RPTP-δ, and RPTP-σ, present on the cell surface of immune cells, in the same or in a similar manner as poxvirus proteins, such as A41L and 130L. Such agents are useful for altering immunoresponsiveness of an immune cell and for treating immunological disorders in a subject.

[0005] 2. Description of the Related Art

[0006] Poxviruses form a group of double-stranded DNA viruses that replicate in the cytoplasm of a cell and have adapted to replicate in numerous different hosts. One adaptive mechanism of many poxviruses involves the acquisition of host genes that allow the viruses to evade the host's immune system and/or facilitate viral replication (Bugert and Darai, Virus Genes 21:111 (2000); Alcami et al., Semin. Virol. 8:419 (1998); McFadden and Barry, Semin. Virol. 8:429 (1998)). This process is facilitated by the relatively large size and complexity of the poxvirus genome. Vaccinia virus, a prototype poxvirus widely used as a smallpox vaccine, has a genome of approximately 190 kilobases, which could potentially encode more than 200 proteins (Goebel et al., Virology 179:247 (1990)). Even though the entire genome of vaccinia virus has been sequenced, the function of many of the potential open reading frames (ORFs), and the existence of polypeptides encoded thereby, remains unknown.

[0007] Certain poxvirus polypeptides contribute to the virulence of the virus. An ORF designated A41L is present in several different poxviruses, including Cowpox virus (CPV), vaccinia virus (strains Copenhagen, Ankara, Tian Tan and WR) and variola virus (including strains Harvey, India-1967 and Garcia-1966). The A41L gene encodes a glycoprotein (herein called A41L polypeptide) that is a viral virulence factor, which is secreted by cells infected with a poxvirus (see, e.g., U.S. Pat. No. 6,852,486; International Patent Application Publication WO 98/37217; Ng et al., J. Gen. Virol. 82:2095-105 (2001)). A41L acts, at least in part, in a host infected with a poxvirus to suppress an immune response specific for the virus.

[0008] Identification of additional viral virulence factors and identification of cell polypeptides that are expressed by immune cells and that interact with A41L would be useful and beneficial for treating immunological disorders, such as, for example, inflammatory diseases and autoimmune diseases, including multiple sclerosis, rheumatoid arthritis, and systemic lupus erythematosus (SLE). A need exists to identify and develop compositions that can be used for treatment and prophylaxis of such immunological diseases and disorders.

### BRIEF SUMMARY OF THE INVENTION

[0009] The several embodiments described herein relate to compositions and methods for preventing and treating immunological diseases and disorders. In one embodiment, an isolated antibody, or antigen-binding fragment thereof, is provided (a) that specifically binds to at least two receptor-like protein tyrosine phosphatase (RPTP) polypeptides selected from (i) leukocyte common antigen-related protein (LAR); (ii) RPTP-σ; and (iii) RPTP-δ; and (b) that competitively inhibits binding of a poxvirus polypeptide to the at least two RPTP polypeptides. In another embodiment, an isolated antibody, or antigen-binding fragment thereof, specifically binds to at least one receptor-like protein tyrosine phosphatase (RPTP) present on the cell surface of an immune cell, wherein the at least one RPTP is RPTP-σ or RPTP-δ, and wherein binding of the antibody, or antigen-binding fragment thereof, to the RPTP that is present on the cell surface of the immune cell suppresses immunoresponsiveness of the immune cell. In a specific embodiment, the antibody is a polyclonal antibody or a monoclonal antibody. In other certain specific embodiments, the antigen-binding fragment is selected from F(ab′)₂, Fab′, Fab, Fd, Fv, and single chain Fv (scFv). In another embodiment, the poxvirus polypeptide is either A41L or Yaba-Like Disease Virus 130L. Further provided herein is a composition that comprises any of the antibodies, or antigen binding fragments thereof, and a pharmaceutically suitable excipient. Also provided in another embodiment, is a method of suppressing an immune response in a subject comprising administering to the subject the composition. In still another embodiment, is a method for treating an immunological disease or disorder in a subject comprising administering to the subject the composition. In another embodiment is provided a method of manufacture for producing the composition.

[0010] Also provided herein is a bispecific antibody comprising (a) a first antigen-binding moiety that is capable of specifically binding to a receptor-like protein tyrosine phosphatase (RPTP), wherein the RPTP is selected from (i) leukocyte common antigen-related protein (LAR); (ii) RPTP-σ; and (iii) RPTP-δ; and (b) a second antigen-binding moiety that is capable of specifically binding to a RPTP, wherein the RPTP is selected from (i) leukocyte common antigen-related protein (LAR); (ii) RPTP-σ; and (iii) RPTP-δ, wherein the first antigen-binding moiety and the second antigen-binding moiety are different, and wherein the bispecific antibody suppresses immunoresponsiveness of an immune cell. Also provided is a composition comprising the bispecific antibody and a pharmaceutically suitable excipient. Also provided in another embodiment, is a method of suppressing an immune response in a subject comprising administering to the subject the composition. In still another embodiment, is a method for treating an immunological disease or disorder in a subject comprising administering to the subject the composition. Also provided in yet another embodiment is a method of manufacture for producing the bispecific antibody.

[0011] In another embodiment, a fusion polypeptide is provided that comprises (a) an immunoglobulin-like domain 2 polypeptide of a first receptor-like protein tyrosine phosphatase (RPTP); (b) an immunoglobulin-like domain 3 polypeptide of a second RPTP; and (c) an immunoglobulin Fc polypeptide or mutein thereof, wherein each of the first RPTP and the second RPTP is selected from (i) leukocyte common antigen-related protein (LAR); (ii) RPTP-σ; and (iii) RPTP-δ, and wherein the first and second RPTP are the same or different. In one particular embodiment, the first RPTP and the second RPTP are the same. In another specific embodiment, the first RPTP is RPTP-σ and the second RPTP is RPTP-σ, and wherein the fusion polypeptide further comprises an immunoglobulin-like domain 1 polypeptide of RPTP-σ. In yet another embodiment, the first RPTP is RPTP-δ and the second RPTP is RPTP-δ, wherein the fusion polypeptide further comprises an immunoglobulin-like domain 1 polypeptide of RPTP-δ. Also provided is a composition that comprises the fusion polypeptide and a pharmaceutically suitable excipient. Also provided in another embodiment, is a method of suppressing an immune response in a subject comprising administering to the subject the composition. In still another embodiment, is a method for treating an immunological disease or disorder in a subject comprising administering to the subject the composition. In another embodiment is provided a method of manufacture for producing the fusion polypeptide.

[0012] Also provided herein is a composition comprising (a) at least one immunoglobulin-like domain 2 polypeptide of a first receptor-like protein tyrosine phosphatase (RPTP) and (b) at least one immunoglobulin-like domain 3 polypeptide of a second RPTP, wherein the first and second RPTP are the same or different and selected from (i) leukocyte common antigen-related protein (LAR); (ii) RPTP-σ; and (iii) RPTP-δ. In a specific embodiment, the first RPTP and the second RPTP are the same, and in another specific embodiment, the first RPTP and the second RPTP are different. In one specific embodiment, the first RPTP is RPTP-σ and the second RPTP is RPTP-σ, and the composition further comprises an immunoglobulin-like domain 1 polypeptide of RPTP-σ. In yet another specific embodiment, the first RPTP is RPTP-δ and the second RPTP is RPTP-δ, and the composition further comprises an immunoglobulin-like domain 1 polypeptide of RPTP-δ.

[0013] Also provided is a composition comprising a polypeptide dimer wherein the dimer comprises (a) a first monomer comprising an immunoglobulin-like domain 2 polypeptide and an immunoglobulin-like domain 3 polypeptide of a first receptor-like protein tyrosine phosphatase (RPTP); and (b) a second monomer comprising an immunoglobulin-like domain 2 polypeptide and an immunoglobulin-like domain 3 polypeptide of a second RPTP, wherein the first and second RPTP are the same or different and selected from (i) leukocyte common antigen-related protein (LAR); (ii) RPTP-σ; and (iii) RPTP-δ. In one particular embodiment, the first RPTP and the second RPTP are different. In another particular embodiment, the first RPTP and the second RPTP are the same. In a specific embodiment, the first monomer further comprises an immunoglobulin-like domain 1 of the first RPTP, and the second monomer further comprises an immunoglobulin-like domain 1 of the second RPTP. In another specific embodiment, the first monomer is fused to an immunoglobulin Fc polypeptide, and the second monomer is fused to an immunoglobulin Fc polypeptide.

[0014] In other specific embodiments, each of the compositions described herein further comprises a pharmaceutically suitable excipient. Also provided in another embodiment, is a method of suppressing an immune response in a subject comprising administering to the subject the composition. In still another embodiment, is a method for treating an immunological disease or disorder in a subject comprising administering to the subject the composition. In another embodiment is provided a method of manufacture for producing the composition.

[0015] In another embodiment, fusion polypeptide is provided that comprises a poxvirus polypeptide fused with a mutein Fc polypeptide, wherein the mutein Fc polypeptide comprises the amino acid sequence of the Fc portion of a human IgG1 immunoglobulin comprising at least one mutation, wherein the at least one mutation is a substitution or a deletion of a cysteine residue in the hinge region, wherein the substituted or deleted cysteine residue is the cysteine residue most proximal to the amino terminus of the hinge region of a wildtype human IgG1 immunoglobulin Fc portion, and wherein the poxvirus polypeptide is capable of binding to a receptor-like protein tyrosine phosphatase (RPTP) selected from (i) leukocyte common antigen-related protein (LAR); (ii) RPTP-σ; and (iii) RPTP-δ. In one particular embodiment, the mutein Fc polypeptide comprises at least one second mutation, wherein the at least one second mutation is a substitution of at least one amino acid in the CH2 domain such that the capability of the fusion polypeptide to bind to an IgG Fc receptor is reduced.

[0016] Also provided herein is a composition comprising any one of the fusion polypeptides and further comprising a pharmaceutically suitable excipient. Compositions are also provided comprising (a) the antibody or antigen-binding fragment thereof, described above, and (b) a pharmaceutically suitable excipient. Also provided in another embodiment, is a method of suppressing an immune response in a subject comprising administering to the subject the composition. In still another embodiment, is a method for treating an immunological disease or disorder in a subject comprising administering to the subject the composition. In another embodiment is provided a method of manufacture for producing the fusion polypeptide.

[0017] In one embodiment, is provided an isolated antibody, or antigen-binding fragment thereof, that specifically binds to at least two receptor-like protein tyrosine phosphatase (RPTP) polypeptides selected from leukocyte common antigen-related protein (LAR); (ii) RPTP-σ; and (iii) RPTP-δ; and (b) competitively inhibits binding of A41L to the at least two RPTP polypeptides. In particular embodiments, the antibody specifically binds LAR and RPTP-σ; the antibody specifically binds LAR and RPTP-δ; or the antibody specifically binds RPTP-σ and RPTP-δ. In another particular embodiment, the antibody specifically binds LAR, RPTP-σ, and RPTP-δ.

[0018] In another embodiment, an isolated antibody, or antigen-binding fragment thereof, is provided that specifically binds to either receptor-like protein tyrosine phosphatase-sigma (RPTP-σ) or receptor-like protein tyrosine phosphatase-delta (RPTP-δ) or both, wherein binding of the antibody, or antigen-binding fragment thereof, inhibits binding of A41L to RPTP-σ, RPTP-δ, or both.

[0019] In yet another embodiment, is provided an isolated antibody, or antigen-binding fragment thereof, that (a) specifically binds to at least two receptor-like protein tyrosine phosphatase (RPTP) polypeptides selected from leukocyte common antigen-related protein (LAR); (ii) RPTP-σ; and (iii) RPTP-δ; and (b) suppresses immunoresponsiveness of an immune cell that expresses at least one of the RPTP polypeptides. In particular embodiments, the antibody specifically binds LAR and RPTP-σ; the antibody specifically binds LAR and RPTP-δ; or the antibody specifically binds RPTP-σ and RPTP-δ. In another particular embodiment, the antibody specifically binds LAR, RPTP-σ, and RPTP-δ.

[0020] In still yet another embodiment, an isolated antibody, or antigen-binding fragment thereof, (a) specifically binds to at least two receptor-like protein tyrosine phosphatases (RPTP) polypeptides selected from (i) leukocyte common antigen-related protein (LAR); (ii) RPTP-σ; and (iii) RPTP-δ; and (b) inhibits binding of A41L to an immune cell that expresses at least one of LAR; (ii) RPTP-σ; and (iii) RPTP-δ. In particular embodiments, the antibody specifically binds LAR and RPTP-σ; the antibody specifically binds LAR and RPTP-δ; or the antibody specifically binds RPTP-σ and RPTP-δ. In another particular embodiment, the antibody specifically binds LAR, RPTP-σ, and RPTP-δ.

[0021] In one embodiment, an isolated antibody, or antigen-binding fragment thereof, is provided that specifically binds to receptor-like protein tyrosine phosphatase-sigma (RPTP-σ), wherein binding of the antibody, or antigen-binding fragment thereof, to RPTP-σ that is present on the cell surface of an immune cell suppresses immunoresponsiveness of the immune cell. In another embodiment, is provided an isolated antibody, or antigen-binding fragment thereof, that specifically binds to receptor-like protein tyrosine phosphatase-delta (RPTP-δ), wherein binding of the antibody, or antigen-binding fragment thereof, to RPTP-δ that is present on the cell surface of an immune suppresses immunoresponsiveness of the immune cell that expresses RPTP-δ. In yet another embodiment, an isolated antibody, or antigen-binding fragment thereof, is provided that specifically binds to either receptor-like protein tyrosine phosphatase-sigma (RPTP-σ) or receptor-like protein tyrosine phosphatase-delta (RPTP-δ) or to both RPTP-σ and RPTP-δ, wherein binding of the antibody, or antigen-binding fragment thereof, with either RPTP-94 or RPTP-δ or to both RPTP-σ and RPTP-δ that are present on the cell surface of an immune cell suppresses immunoresponsiveness of the immune cell.

[0022] In certain embodiments, with respect to any one of the above-described antibodies, the antibody is a polyclonal antibody. In other certain embodiments, the antibody is a monoclonal antibody. In another specific embodiment, the monoclonal antibody is selected from a mouse monoclonal antibody, a human monoclonal antibody, a rat monoclonal antibody, and a hamster monoclonal antibody. Also provided herein is host cell that expresses the monoclonal antibody; and in certain specific embodiments, the host cell is a hybridoma cell. In another particular embodiment, the antibody is a humanized antibody or a chimeric antibody. In another embodiment, a host cell is provided that expresses the humanized antibody or a chimeric antibody.

[0023] In another particular embodiment, a composition is provided that comprises any one of the above-described antibodies (or antigen-binding fragment thereof) and a pharmaceutically suitable carrier. Also provided in another embodiment is a method of manufacture for producing any of the aforementioned antibodies, or antigen-binding fragments thereof.

[0024] In other specific embodiments, with respect to any one of the antigen-binding fragments of any one of the above-described antibodies, the antigen-binding fragment is selected from F(ab′)₂, Fab′, Fab, Fd, and Fv. In another specific embodiment, the antigen-binding fragment is of human, mouse, chicken, or rabbit origin. In still another specific embodiment, the antigen-binding fragment is a single chain Fv (scFv). In another particular embodiment, a composition is provided that comprises any one of the antigen-binding fragments of any one of the above-described antibodies and a pharmaceutically suitable carrier.

[0025] Also provided in another embodiment is an isolated antibody comprising an anti-idiotype antibody, or antigen-binding fragment thereof, that specifically binds to any one of the aforementioned antibodies, or to an antigen binding fragment thereof. In certain embodiments, the anti-idiotype antibody is a polyclonal antibody. In other certain embodiments, the anti-idiotype antibody is a monoclonal antibody. Also provided herein is a host cell that expresses the anti-idiotype antibody. In certain specific embodiments, the host cell is a hybridoma cell. In another particular embodiment, a composition is provided that comprises the anti-idiotype antibody, or antigen-binding fragment thereof, and a pharmaceutically suitable carrier.

[0026] In one embodiment, also provided is a bispecific antibody comprising (a) a first antigen-binding moiety that is capable of specifically binding to a RPTP, wherein the RPTP is selected from (i) leukocyte common antigen-related protein (LAR); (ii) RPTP-94; and (iii) RPTP-δ; and (b) a second antigen-binding moiety that is capable of specifically binding to a RPTP, wherein the RPTP selected from (i) leukocyte common antigen-related protein (LAR); (ii) RPTP-σ; and (iii) RPTP-δ, wherein the bispecific antibody suppresses immunoresponsiveness of an immune cell. In a specific embodiment, the first antigen-binding moiety is capable of specifically binding to LAR and the second antigen-binding moiety is capable of specifically binding to RPTP-σ. In another specific embodiment, the first antigen-binding moiety is capable of specifically binding to LAR and the second antigen-binding moiety is capable of specifically binding to RPTP-δ. In yet another specific embodiment, the first antigen-binding moiety is capable of specifically binding to RPTP-σ and the second antigen-binding moiety is capable of specifically binding to RPTP-δ. In another particular embodiment, a composition is provided that comprises the bispecific antibody and a pharmaceutically suitable carrier.

[0027] In another embodiment, a fusion polypeptide is provided that comprises at least one immunoglobulin-like domain of a RPTP selected from (i) leukocyte common antigen-related protein (LAR); (ii) RPTP-σ; and (iii) RPTP-δ, fused with at least one immunoglobulin constant region domain. In a specific embodiment, the at least one immunoglobulin-like domain of the RPTP is fused with an immunoglobulin Fc polypeptide. In a particular embodiment, the Fc polypeptide is derived from a human IgG1 immunoglobulin. In another specific embodiment, the RPTP is LAR and the fusion polypeptide suppresses immunoresponsiveness of an immune cell. In a specific embodiment, the Fc polypeptide is a mutein Fc polypeptide that comprises a substitution or a deletion of a cysteine residue in the hinge region, and wherein the substituted or deleted cysteine residue is the cysteine residue most proximal to the amino terminus of the hinge region of the Fc portion of a wildtype IgG1 immunoglobulin. In yet another specific embodiment, the Fc polypeptide is a mutein Fc polypeptide that comprises at least one substitution of an amino acid residue in the CH2 domain of the mutein Fc polypeptide, such that the capability of the fusion polypeptide to bind to an IgG Fc receptor is reduced. In still yet another specific embodiment, the mutein Fc polypeptide further comprises a substitution or a deletion of a cysteine residue in the hinge region, wherein the substituted or deleted cysteine residue is the cysteine residue most proximal to the amino terminus of the hinge region of the Fc portion of a wildtype IgG1 immunoglobulin. In yet another specific embodiment, the RPTP is RPTP-σ, and the fusion polypeptide suppresses immunoresponsiveness of an immune cell. In another specific embodiment, the RPTP is RPTP-δ, and wherein the fusion polypeptide suppresses immunoresponsiveness of an immune cell. In another particular embodiment, a composition is provided that comprises the fusion polypeptide and a pharmaceutically suitable carrier.

[0028] In one embodiment, an agent is provided that specifically binds to at least two receptor-like protein tyrosine phosphatase (RPTP) polypeptides selected from leukocyte common antigen-related protein (LAR); (ii) RPTP-σ; and (iii) RPTP-δ; and (b) impairs binding of A41L to any one of LAR, RPTP-σ, and RPTP-δ. In a certain embodiment, the agent impairs binding of A41L to any one of LAR, RPTP-σ, and RPTP-δ present on the cell surface of an immune cell. In other specific embodiments, the agent is selected from an antibody or antigen binding fragment thereof; a small molecule; an aptamer; and a peptide-IgFc fusion polypeptide. In another particular embodiment, a composition is provided that comprises the agent and a pharmaceutically suitable carrier.

[0029] Also provided in an embodiment is agent that specifically impairs expression of at least two receptor-like protein tyrosine phosphatase (RPTP) polypeptides selected from leukocyte common antigen-related protein (LAR); (ii) RPTP-σ; and (iii) RPTP-δ. In a particular embodiment, the agent comprises an antisense polynucleotide, and in another particular embodiment, the agent comprises a short interfering RNA (siRNA). In another particular embodiment, a composition is provided that comprises the agent and a pharmaceutically suitable carrier.

[0030] In another embodiment, a method is provided for identifying an agent that suppresses immunoresponsiveness of an immune cell comprising: (a) contacting (1) a candidate agent; (2) an immune cell that expresses at least one receptor-like protein tyrosine phosphatase (RPTP) polypeptide selected from (i) leukocyte common antigen-related protein (LAR); (ii) RPTP-σ; and (iii) RPTP-δ; and (3) A41L, under conditions and for a time sufficient to permit interaction between the at least one RPTP polypeptide and A41L; and (b) determining a level of binding of A41L to the immune cell in the presence of the candidate agent and comparing a level of binding of A41L to the immune cell in the absence of the candidate agent, wherein a decrease in the level of binding of A41L to the immune cell in the presence of the candidate agent indicates that the candidate agent suppresses immunoresponsiveness of the immune cell. In a specific embodiment, the immune cell expresses at least two RPTP polypeptides selected from (i) LAR; (ii) RPTP-σ; and (iii) RPTP-δ.

[0031] Also provided herein is a method for identifying an agent that inhibits binding of A41L to at least two receptor-like protein tyrosine phosphatase (RPTP) polypeptides comprising: (a) contacting (1) a candidate agent; (2) a biological sample comprising at least two RPTP polypeptides selected from (i) leukocyte common antigen-related protein (LAR); (ii) RPTP-σ; and (iii) RPTP-δ; and (3) A41L, under conditions and for a time sufficient to permit interaction between the at least two RPTP polypeptides and A41L; and (b) determining a level of binding of A41L to the at least two RPTP polypeptides in the presence of the candidate agent and comparing a level of binding of A41L to the at least two RPTP polypeptides in the absence of the candidate agent, wherein a decrease in the level of binding of A41L to the at least two RPTP polypeptides in the presence of the candidate agent indicates that the candidate agent inhibits binding of A41L to the at least two RPTP polypeptides.

[0032] In another embodiment, a method is provided for suppressing an immune response in a subject comprising administering a composition that comprises a pharmaceutically suitable carrier and an antibody, or antigen-binding fragment thereof, that specifically binds to a receptor-like protein tyrosine phosphatase (RPTP)-σ. In one embodiment, method is provided for suppressing an immune response in a subject comprising administering a composition comprising a pharmaceutically suitable carrier and an antibody, or antigen-binding fragment thereof, that specifically binds to receptor-like protein tyrosine phosphatase (RPTP)-δ. In another embodiment, a method is provided for suppressing an immune response in a subject comprising administering a composition comprising a pharmaceutically suitable carrier and an antibody, or antigen-binding fragment thereof, that (a) specifically binds to at least two receptor-like protein tyrosine phosphatase (RPTP) polypeptides selected from (i) leukocyte common antigen-related protein (LAR); (ii) RPTP-σ; and (iii) RPTP-δ.

[0033] In one embodiment, a method is provided for treating an immunological disease or disorder in a subject comprising administering to the subject a pharmaceutically suitable carrier and an agent that either (a) alters a biological activity of at least one receptor-like protein tyrosine phosphatase (RPTP) polypeptide, wherein the RPTP is either RPTP-σ or RPTP-δ; or (b) alters a biological activity of at least two RPTP polypeptides selected from leukocyte common antigen-related protein (LAR); (ii) RPTP-σ; and (iii) RPTP-δ. In a specific embodiment, the immunological disease or disorder is an autoimmune disease or an inflammatory disease. In a certain embodiment, the autoimmune or inflammatory disease is multiple sclerosis, rheumatoid arthritis, systemic lupus erythematosus, graft versus host disease, sepsis, diabetes, psoriasis, atherosclerosis, Sjogren's syndrome, progressive systemic sclerosis, scleroderma, acute coronary syndrome, ischemic reperfusion, Crohn's Disease, endometriosis, glomerulonephritis, myasthenia gravis, idiopathic pulmonary fibrosis, asthma, acute respiratory distress syndrome (ARDS), vasculitis, or inflammatory autoimmune myositis. In another particular embodiment, the agent is selected from an antibody, or antigen-binding fragment thereof; a small molecule; an aptamer; an antisense polynucleotide; a small interfering RNA (siRNA); and a peptide-IgFc fusion polypeptide.

[0034] In one embodiment, is provided a method for treating a disease or disorder associated with alteration of at least one of cell migration, cell proliferation, and cell differentiation in a subject comprising administering to the subject a pharmaceutically suitable carrier and an agent that either (a) alters a biological activity of at least one of receptor-like protein tyrosine phosphatase (RPTP)-σ or RPTP-δ; or (b) alters a biological activity of at least two RPTP polypeptides selected from (i) leukocyte common antigen-related protein (LAR); (ii) RPTP-σ; and (iii) RPTP-δ. In certain embodiments, the disease or disorder is an immunological disease or disorder, a cardiovascular disease or disorder, a metabolic disease or disorder, or a proliferative disease or disorder. In a particular embodiment, the immunological disease or disorder is an autoimmune disease or an inflammatory disease. In another certain embodiment, the immunological disease or disorder is multiple sclerosis, rheumatoid arthritis, systemic lupus erythematosus, graft versus host disease, sepsis, diabetes, psoriasis, atherosclerosis, Sjogren's syndrome, progressive systemic sclerosis, scleroderma, acute coronary syndrome, ischemic reperfusion, Crohn's Disease, endometriosis, glomerulonephritis, myasthenia gravis, idiopathic pulmonary fibrosis, asthma, acute respiratory distress syndrome (ARDS), vasculitis, or inflammatory autoimmune myositis. In another particular embodiment, the cardiovascular disease or disorder is atherosclerosis, endocarditis, hypertension, or peripheral ischemic disease. In another particular embodiment, the agent is selected from an antibody, or antigen-binding fragment thereof; a small molecule; an aptamer; an antisense polynucleotide; a small interfering RNA (siRNA); and a peptide-IgFc fusion polypeptide.

[0035] In another embodiment, a method of manufacture is provided for producing an agent that suppresses immunoresponsiveness of an immune cell, comprising (a) identifying an agent that suppresses immunoresponsiveness of an immune cell, wherein the step of identifying comprises (1) contacting (i) a candidate agent; (ii) an immune cell that expresses at least one receptor-like protein tyrosine phosphatase (RPTP) polypeptide selected from leukocyte common antigen-related protein (LAR); RPTP-σ; and RPTP-δ; and (iii) A41L, under conditions and for a time sufficient to permit interaction between the at least one RPTP polypeptide and A41L; and (2) determining a level of binding of A41L to the immune cell in the presence of the candidate agent and comparing a level of binding of A41L to the immune cell in the absence of the candidate agent, wherein a decrease in the level binding of A41L to the immune cell in the presence of the candidate agent indicates that the candidate agent suppresses immunoresponsiveness of the immune cell; and (b) producing the agent identified in step (a). In certain embodiments, the agent is selected from an antibody, or antigen-binding fragment thereof; a small molecule; an aptamer; an antisense polynucleotide; a small interfering RNA (siRNA); and a peptide-IgFc fusion polypeptide. In another certain embodiment, the agent is an antibody, or antigen-binding fragment thereof.

[0036] In one embodiment, a fusion polypeptide comprises an A41L polypeptide fused in frame with a mutein Fc polypeptide, wherein the mutein Fc polypeptide comprises the amino acid sequence of the Fc portion of a human IgG1 immunoglobulin, wherein the mutein Fc polypeptide differs from the Fc portion of a wildtype human IgG1 immunoglobulin by comprising at least two mutations, wherein a first mutation in the mutein Fc polypeptide comprises substitution of at least one amino acid in the CH2 domain such that the capability of the fusion polypeptide to bind to an IgG Fc receptor is reduced, and wherein a second mutation in the mutein Fc polypeptide is a substitution or a deletion of a cysteine residue in the hinge region, wherein the cysteine residue is the cysteine residue most proximal to the amino terminus of the hinge region of a wildtype human IgG1 immunoglobulin. In a specific embodiment, the mutein Fc polypeptide comprises substitution of at least two amino acids in the CH2 domain. In another specific embodiment, the mutein Fc polypeptide comprises substitution of at least three amino acids in the CH2 domain. In yet another specific embodiment, the amino acid that is substituted in the CH2 domain is located at a position that corresponds to EU position number 235 in the CH2 domain of a human IgG immunoglobulin. In still another specific embodiment, a first amino acid that is substituted is located at a position that corresponds to EU position number 234 in the CH2 domain of a human IgG immunoglobulin and a second amino acid that is substituted is located at a position that corresponds to EU position number 235 in the CH2 domain of a human IgG immunoglobulin. In yet another specific embodiment, a first amino acid that is substituted is located at a position that corresponds to EU position number 234 in the CH2 domain of a human IgG immunoglobulin, a second amino acid that is substituted is located at a position that corresponds to EU position number 235 in the CH2 domain of a human IgG immunoglobulin, and a third amino acid that is substituted is located at a position that corresponds to EU position number 237 in the CH2 domain of a human IgG immunoglobulin. In a certain specific embodiment, the leucine reside located at a position that corresponds to EU position number 235 in the CH2 domain of a human IgG immunoglobulin is substituted with a glutamic acid residue or an alanine residue. In another particular embodiment, the leucine residue located at a position that corresponds to EU position number 234 in the CH2 domain of a human IgG immunoglobulin is substituted with an alanine residue. In still another specific embodiment, the glycine residue located at a position that corresponds to EU position number 237 in the CH2 domain of a human IgG immunoglobulin is substituted with an alanine residue. In another particular embodiment, the mutein Fc polypeptide further comprises substitution or deletion of at least one non-cysteine residue in the hinge region. In another particular embodiment, the mutein Fc polypeptide comprises a deletion of at least two amino acid residues in the hinge region, wherein the at least two amino acid residues include a cysteine residue and the adjacent C-terminal residue, wherein the cysteine residue is the cysteine residue most proximal to the amino terminus of the hinge region of a wildtype human IgG1 immunoglobulin. In a specific embodiment, the fusion polypeptide comprises the amino acid sequence set forth in SEQ ID NO:73.

[0037] Also provided herein is a method of suppressing an immune response in a subject comprising administering a composition that comprises a pharmaceutically suitable carrier and the fusion polypeptide comprising an A41L polypeptide fused in frame with a mutein Fc polypeptide described above. In a particular embodiment, the fusion polypeptide either (a) alters a biological activity of at least one of receptor-like protein tyrosine phosphatase (RPTP)-σ and RPTP-δ; or (b) alters a biological activity of at least two RPTP polypeptides selected from (i) leukocyte common antigen-related protein (LAR); (ii) RPTP-σ; and (iii) RPTP-δ.

[0038] In another embodiment, a method is provided for treating an immunological disease or disorder in a subject comprising administering to the subject a pharmaceutically suitable carrier and the fusion polypeptide comprising an A41L polypeptide fused in frame with a mutein Fc polypeptide described above. In a specific embodiment, the fusion polypeptide either (a) alters a biological activity of at least one of receptor-like protein tyrosine phosphatase (RPTP)-σ and RPTP-δ; or (b) alters a biological activity of at least two RPTP polypeptides selected from (i) leukocyte common antigen-related protein (LAR); (ii) RPTP-σ; and (iii) RPTP-δ. In another particular embodiment, the immunological disease or disorder is an autoimmune disease or an inflammatory disease, wherein in certain embodiments, the autoimmune or inflammatory disease is multiple sclerosis, rheumatoid arthritis, systemic lupus erythematosus, graft versus host disease, sepsis, diabetes, psoriasis, atherosclerosis, Sjogren's syndrome, progressive systemic sclerosis, scleroderma, acute coronary syndrome, ischemic reperfusion, Crohn's Disease, endometriosis, glomerulonephritis, myasthenia gravis, idiopathic pulmonary fibrosis, asthma, acute respiratory distress syndrome (ARDS), vasculitis, or inflammatory autoimmune myositis.

[0039] In one embodiment, a method is provided for treating a disease or disorder associated with alteration of at least one of cell migration, cell proliferation, and cell differentiation in a subject comprising administering to the subject a pharmaceutically suitable carrier and the fusion polypeptide comprising an A41L polypeptide fused in frame with a mutein Fc polypeptide described above. In a particular embodiment, the fusion polypeptide either (a) alters a biological activity of at least one of receptor-like protein tyrosine phosphatase (RPTP)-σ or RPTP-δ; or (b) alters a biological activity of at least two RPTP polypeptides selected from (i) leukocyte common antigen-related protein (LAR); (ii) RPTP-σ; and (iii) RPTP-δ. In another embodiment, the disease or disorder is an immunological disease or disorder, a cardiovascular disease or disorder, a metabolic disease or disorder, or a proliferative disease or disorder. In a specific embodiment, the immunological disease or disorder is an autoimmune disease or an inflammatory disease. In another specific embodiment, the immunological disease or disorder is multiple sclerosis, rheumatoid arthritis, systemic lupus erythematosus, graft versus host disease, sepsis, diabetes, psoriasis, atherosclerosis, Sjogren's syndrome, progressive systemic sclerosis, scleroderma, acute coronary syndrome, ischemic reperfusion, Crohn's Disease, endometriosis, glomerulonephritis, myasthenia gravis, idiopathic pulmonary fibrosis, asthma, acute respiratory distress syndrome (ARDS), vasculitis, or inflammatory autoimmune myositis. In yet another specific embodiment, the cardiovascular disease or disorder is atherosclerosis, endocarditis, hypertension, or peripheral ischemic disease. In another embodiment, is provided method of manufacture for producing the fusion polypeptide comprising an A41L polypeptide fused in frame with a mutein Fc polypeptide described above.

[0040] In another embodiment, an isolated antibody, or antigen-binding fragment thereof is provided that (a) specifically binds to at least one receptor-like protein tyrosine phosphatase (RPTP) polypeptide selected from (i) leukocyte common antigen-related protein (LAR); (ii) RPTP-σ; and (iii) RPTP-δ; and (b) competitively inhibits binding of a 130L polypeptide to the at least one RPTP polypeptide, wherein the amino acid sequence of the 130L polypeptide is at least 80% identical to the amino acid sequence set forth in SEQ ID NO:85 or SEQ ID NO:150. In a particular embodiment, the 130L polypeptide specifically binds to at least two RPTP polypeptides selected from (i) LAR; (ii) RPTP-σ; and (iii) RPTP-δ, and in another particular embodiment, the 130L polypeptide specifically binds to (i) LAR; (ii) RPTP-σ; and (iii) RPTP-δ. In certain specific embodiments, the antibody, or antigen-binding fragment thereof, specifically binds LAR and RPTP-σ. In another specific embodiment, the antibody, or antigen-binding fragment thereof, specifically binds LAR and RPTP-δ. In yet another specific embodiment, the antibody, or antigen-binding fragment thereof, specifically binds RPTP-σ and RPTP-δ. In another embodiment, the antibody or antigen-binding fragment alters immunoresponsiveness of an immune cell that expresses at least one of the RPTP polypeptides. In a specific embodiment, altering the immunoresponsiveness of the immune cell is suppressing the immunoresponsiveness of the immune cell.

[0041] In another embodiment, is provided an isolated antibody, or antigen-binding fragment thereof, that (a) specifically binds to at least one receptor-like protein tyrosine phosphatases (RPTP) polypeptide selected from (i) leukocyte common antigen-related protein (LAR); (ii) RPTP-σ; and (iii) RPTP-δ; and (b) inhibits binding of a 130L polypeptide to an immune cell that expresses at least one of (i) LAR; (ii) RPTP-σ; and (iii) RPTP-δ, wherein the amino acid sequence of the 130L polypeptide is at least 80% identical to the amino acid sequence set forth in SEQ ID NO:85 or SEQ ID NO:150. In a specific embodiment, the amino acid sequence of the 130L polypeptide (a) comprises the amino acid sequence set forth in SEQ ID NO:85 or SEQ ID NO:150; (b) is at least 95% identical to SEQ ID NO:85 or SEQ ID NO:150; (c) is at least 90% identical to SEQ ID NO:85 or SEQ ID NO:150; or (d) is at least 85% identical to SEQ ID NO:85 or SEQ ID NO:150. In certain specific embodiments, the antibody, or antigen-binding fragment thereof, specifically binds LAR and RPTP-σ. In another specific embodiment, the antibody, or antigen-binding fragment thereof, specifically binds LAR and RPTP-δ. In yet another specific embodiment, the antibody, or antigen-binding fragment thereof, specifically binds RPTP-σ and RPTP-δ. In another specific embodiment, the antibody, or antigen-binding fragment thereof, specifically binds LAR, RPTP-σ, and RPTP-δ.

[0042] Also provided herein, is an isolated antibody, or antigen-binding fragment thereof, that specifically binds to either receptor-like protein tyrosine phosphatase-sigma (RPTP-σ) or receptor-like protein tyrosine phosphatase-delta (RPTP-δ) or both, wherein binding of the antibody, or antigen-binding fragment thereof alters immunoresponsiveness of an immune cell that expresses a RPTP selected from (i) leukocyte common antigen-related protein (LAR); (ii) RPTP-σ; and (iii) RPTP-δ. In certain embodiments, altering immunoresponsiveness of the immune cell is suppressing the immunoresponsiveness of the immune cell.

[0043] In certain particular embodiments, any one of the antibodies described above and herein is a polyclonal antibody. In another particular embodiment, the antibody is a monoclonal antibody. In a certain embodiment, the monoclonal antibody is selected from a mouse monoclonal antibody, a human monoclonal antibody, a rat monoclonal antibody, and a hamster monoclonal antibody. Also provided herein is a host cell that expresses such an antibody, and in particular embodiments, the host cell is a hybridoma cell. In other embodiments, any one of the antibodies described above and herein is a humanized antibody or a chimeric antibody. Also provided herein is a host cell that expresses the humanized antibody or chimeric antibody. In other particular embodiments, the antigen-binding fragment is selected from F(ab′)₂, Fab′, Fab, Fd, and Fv. In a particular embodiment, the antigen-binding fragment is of human, mouse, chicken, or rabbit origin. In another particular embodiment, the antigen-binding fragment is a single chain Fv (scFv). An isolated antibody comprising an anti-idiotype antibody, or antigen-binding fragment thereof, that specifically binds to any one of the antibodies described above and herein. In a particular embodiment, the anti-idiotype antibody is a polyclonal antibody. In another particular embodiment, the anti-idiotype antibody is a monoclonal antibody. In another embodiment, is a composition comprising an anti-idiotype antibody, or antigen-binding fragment thereof, and a pharmaceutically suitable carrier.

[0044] Also provided herein in another embodiment, is a composition comprising any one of the antibodies, or antigen-binding fragment thereof, and a pharmaceutically suitable carrier. Also provided herein is a method of manufacture for producing any one of the antibodies, or antigen-binding fragment thereof, described above and herein.

[0045] Also provided herein is an agent that (a) specifically binds to at least one receptor-like protein tyrosine phosphatase (RPTP) polypeptide selected from (i) leukocyte common antigen-related protein (LAR); (ii) RPTP-σ; and (iii) RPTP-δ; and (b) impairs binding of a 130L polypeptide to any one of LAR, RPTP-σ, and RPTP-δ, wherein the amino acid sequence of the 130L polypeptide is at least 80% identical to the amino acid sequence set forth in either SEQ ID NO:85 or SEQ ID NO:150. In certain embodiments, the amino acid sequence of the 130L polypeptide (a) comprises the amino acid sequence set forth in SEQ ID NO:85 or SEQ ID NO:150;(b) is at least 95% identical to SEQ ID NO:85 or SEQ ID NO:150; (c) is at least 90% identical to SEQ ID NO:85 or SEQ ID NO:150; or (d) is at least 85% identical to SEQ ID NO:85 or SEQ ID NO:150. In a specific embodiment, the agent specifically binds to at least two RPTP polypeptides selected from (i) LAR; (ii) RPTP-σ; and (iii) RPTP-δ. In another specific embodiment, the agent impairs binding of the 130L polypeptide to an immune cell that expresses any one of LAR, RPTP-σ, and RPTP-δ. In a particular embodiment, the agent is selected from an antibody or antigen binding fragment thereof; a small molecule; an aptamer; and a peptide-IgFc fusion polypeptide.

[0046] Also provided herein is a composition comprising any one of the agents described above and herein and a pharmaceutically suitable carrier.

[0047] In another embodiment, a method is provided for identifying an agent that suppresses immunoresponsiveness of an immune cell comprising: (a) contacting (1) a candidate agent; (2) an immune cell that expresses at least one receptor-like protein tyrosine phosphatase (RPTP) polypeptide selected from (i) leukocyte common antigen-related protein (LAR); (ii) RPTP-σ; and (iii) RPTP-δ; and (3) a 130L polypeptide, wherein the amino acid sequence of the 130L polypeptide is at least 80% identical to the amino acid sequence set forth in SEQ ID NO:85 or SEQ ID NO:150, under conditions and for a time sufficient to permit interaction between the at least one RPTP polypeptide and the 130L polypeptide; and (b) determining a level of binding of the 130L polypeptide to the immune cell in the presence of the candidate agent and comparing a level of binding of the 130L polypeptide to the immune cell in the absence of the candidate agent, wherein a decrease in the level of binding of the 130L polypeptide to the immune cell in the presence of the candidate agent indicates that the candidate agent suppresses immunoresponsiveness of the immune cell. In certain embodiments, the amino acid sequence of the 130L polypeptide (a) comprises the amino acid sequence set forth in SEQ ID NO:85 or SEQ ID NO:150; (b) is at least 95% identical to SEQ ID NO:85 or SEQ ID NO:150; (c) is at least 90% identical to SEQ ID NO:85 or SEQ ID NO:150; or (d) is at least 85% identical to SEQ ID NO:85 or SEQ ID NO:150. In a particular embodiment, the immune cell expresses at least two RPTP polypeptides selected from (i) LAR; (ii) RPTP-σ; and (iii) RPTP-δ.

[0048] Also provided herein, in another embodiment, is a method for identifying an agent that inhibits binding of a 130L polypeptide to at least one receptor-like protein tyrosine phosphatase (RPTP) polypeptides comprising: (a) contacting (1) a candidate agent; (2) a biological sample comprising a RPTP polypeptide selected from (i) leukocyte common antigen-related protein (LAR); (ii) RPTP-σ; and (iii) RPTP-δ; and (3) the 130L polypeptide, wherein the amino acid sequence of the 130L polypeptide is at least 80% identical to the amino acid sequence set forth in SEQ ID NO:85 or SEQ ID NO:150, under conditions and for a time sufficient to permit interaction between the RPTP polypeptide and the 130L polypeptide; and (b) determining a level of binding of the 130L polypeptide to the RPTP polypeptide in the presence of the candidate agent and comparing a level of binding of the 130L polypeptide to the RPTP polypeptide in the absence of the candidate agent, wherein a decrease in the level of binding of the 130L polypeptide to the RPTP polypeptide in the presence of the candidate agent indicates that the candidate agent inhibits binding of the 130L polypeptide to the RPTP polypeptide. In certain embodiments, the amino acid sequence of the 130L polypeptide (a) comprises the amino acid sequence set forth in SEQ ID NO:85 or SEQ ID NO:150; (b) is at least 95% identical to SEQ ID NO:85 or SEQ ID NO:150; (c) is at least 90% identical to SEQ ID NO:85 or SEQ ID NO:150; or (d) is at least 85% identical to SEQ ID NO:85 or SEQ ID NO:150.

[0049] Also provided herein is a method of manufacture for producing an agent that suppresses immunoresponsiveness of an immune cell, comprising: (a) identifying an agent that suppresses immunoresponsiveness of an immune cell, wherein the step of identifying comprises: (1) contacting (i) a candidate agent; (ii) an immune cell that expresses at least one receptor-like protein tyrosine phosphatase (RPTP) polypeptide selected from leukocyte common antigen-related protein (LAR); RPTP-σ; and RPTP-δ; and (iii) a 130L polypeptide, wherein the amino acid sequence of the 130L polypeptide is at least 80% identical to the amino acid sequence set forth in SEQ ID NO:85 or SEQ ID NO:150, under conditions and for a time sufficient to permit interaction between the at least one RPTP polypeptide and the 130L polypeptide; and (2) determining a level of binding of the 130L polypeptide to the immune cell in the presence of the candidate agent and comparing a level of binding of the 130L polypeptide to the immune cell in the absence of the candidate agent, wherein a decrease in the level binding of the 130L polypeptide to the immune cell in the presence of the candidate agent indicates that the candidate agent suppresses immunoresponsiveness of the immune cell; and (b) producing the agent identified in step (a). In certain embodiments, the amino acid sequence of the 130L polypeptide (a) comprises the amino acid sequence set forth in SEQ ID NO:85 or SEQ ID NO:150; (b) is at least 95% identical to SEQ ID NO:85 or SEQ ID NO:150; (c) is at least 90% identical to SEQ ID NO:85 or SEQ ID NO:150; or (d) is at least 85% identical to SEQ ID NO:85 or SEQ ID NO:150. In a specific embodiment, the agent is selected from an antibody, or antigen-binding fragment thereof; a small molecule; an aptamer; an antisense polynucleotide; a small interfering RNA (siRNA); and a peptide-IgFc fusion polypeptide. In yet another specific embodiment, the agent is an antibody, or antigen-binding fragment thereof.

[0050] In another embodiment, a fusion polypeptide comprising a 130L polypeptide fused to an Fc polypeptide is provided. In a particular embodiment, the Fc polypeptide is a human IgG1 Fc polypeptide. In a specific embodiment, the human IgG1 Fc polypeptide is a mutein Fc polypeptide, wherein the mutein Fc polypeptide comprises the amino acid sequence of the Fc portion of a human IgG1 immunoglobulin, wherein the mutein Fc polypeptide differs from the Fc portion of a wildtype human IgG1 immunoglobulin by comprising at least two mutations, wherein a first mutation in the mutein Fc polypeptide comprises substitution of at least one amino acid in the CH2 domain such that the capability of the fusion polypeptide to bind to an IgG Fc receptor is reduced, and wherein a second mutation in the mutein Fc polypeptide is a substitution or a deletion of a cysteine residue in the hinge region, wherein the cysteine residue is the cysteine residue most proximal to the amino terminus of the hinge region of a wildtype human IgG1 immunoglobulin. In another specific embodiment, the mutein Fc polypeptide comprises substitution of at least two amino acids in the CH2 domain. In yet another specific embodiment, the mutein Fc polypeptide comprises substitution of at least three amino acids in the CH2 domain. In certain embodiments, the amino acid that is substituted is located at a position that corresponds to EU position number 235 in the CH2 domain of a human IgG immunoglobulin. In other certain embodiments, a first amino acid that is substituted is located at a position that corresponds to EU position number 234 in the CH2 domain of a human IgG immunoglobulin and a second amino acid that is substituted is located at a position that corresponds to EU position number 235 in the CH2 domain of a human IgG immunoglobulin. In another certain embodiment, a first amino acid that is substituted is located at a position that corresponds to EU position number 234 in the CH2 domain of a human IgG immunoglobulin, a second amino acid that is substituted is located at a position that corresponds to EU position number 235 in the CH2 domain of a human IgG immunoglobulin, and a third amino acid that is substituted is located at a position that corresponds to EU position number 237 in the CH2 domain of a human IgG immunoglobulin. In a particular embodiment, the leucine reside located at a position that corresponds to EU position number 235 in the CH2 domain of a human IgG immunoglobulin is substituted with a glutamic acid residue or an alanine residue. In another particular embodiment, the leucine residue located at a position that corresponds to EU position number 234 in the CH2 domain of a human IgG immunoglobulin is substituted with an alanine residue. In yet another particular embodiment, the glycine residue located at a position that corresponds to EU position number 237 in the CH2 domain of a human IgG immunoglobulin is substituted with an alanine residue. In yet another specific embodiment, the mutein Fc polypeptide further comprises substitution or deletion of at least one non-cysteine residue in the hinge region. In one particular embodiment, the mutein Fc polypeptide comprises a deletion of at least two amino acid residues in the hinge region, wherein the at least two amino acid residues include a cysteine residue and the adjacent C-terminal residue, wherein the cysteine residue is the cysteine residue most proximal to the amino terminus of the hinge region of a wildtype human IgG1 immunoglobulin. In a specific embodiment, the fusion polypeptide comprises the amino acid sequence set forth in SEQ ID NO:149.

[0051] In another embodiment, a method of suppressing an immune response in a subject is provided wherein the method comprises administering a composition that comprises a pharmaceutically suitable carrier and the fusion polypeptide comprising a 130L polypeptide fused to an Fc polypeptide as described above and herein. In a particular embodiment, the fusion polypeptide either (a) alters a biological activity of at least one of a receptor-like protein tyrosine phosphatase (RPTP) selected from (i) leukocyte common antigen-related protein (LAR); (ii) RPTP-σ; and (iii) RPTP-δ; or (b) alters a biological activity of at least two RPTP polypeptides selected from (i) LAR; (ii) RPTP-σ; and (iii) RPTP-δ. In another embodiment, a method is provided for treating an immunological disease or disorder in a subject comprising administering to the subject a pharmaceutically suitable carrier and a fusion polypeptide comprising a 130L polypeptide fused to an Fc polypeptide as described above and herein. In a specific embodiment, the fusion polypeptide either (a) alters a biological activity of at least one of receptor-like protein tyrosine phosphatase (RPTP)-σ and RPTP-δ; or (b) alters a biological activity of at least two RPTP polypeptides selected from (i) leukocyte common antigen-related protein (LAR); (ii) RPTP-σ; and (iii) RPTP-δ. In certain embodiments, the immunological disease or disorder is an autoimmune disease or an inflammatory disease. In particular embodiments, the autoimmune or inflammatory disease is multiple sclerosis, rheumatoid arthritis, systemic lupus erythematosus, graft versus host disease, sepsis, diabetes, psoriasis, atherosclerosis, Sjogren's syndrome, progressive systemic sclerosis, scleroderma, acute coronary syndrome, ischemic reperfusion, Crohn's Disease, endometriosis, glomerulonephritis, myasthenia gravis, idiopathic pulmonary fibrosis, asthma, acute respiratory distress syndrome (ARDS), vasculitis, or inflammatory autoimmune myositis.

[0052] In another embodiment, a method is provided for treating a disease or disorder associated with alteration of at least one of cell migration, cell proliferation, and cell differentiation in a subject comprising administering to the subject a pharmaceutically suitable carrier and a fusion polypeptide comprising a 130L polypeptide fused to an Fc polypeptide as described above and herein. In a specific embodiment, the fusion polypeptide either (a) alters a biological activity of at least one of receptor-like protein tyrosine phosphatase (RPTP)-σ or RPTP-δ; or (b) alters a biological activity of at least two RPTP polypeptides selected from (i) leukocyte common antigen-related protein (LAR); (ii) RPTP-σ; and (iii) RPTP-δ. In another specific embodiment, the disease or disorder is an immunological disease or disorder, a cardiovascular disease or disorder, a metabolic disease or disorder, or a proliferative disease or disorder. In yet another specific embodiment, the immunological disease or disorder is an autoimmune disease or an inflammatory disease. In certain embodiments, the immunological disease or disorder is multiple sclerosis, rheumatoid arthritis, systemic lupus erythematosus, graft versus host disease, sepsis, diabetes, psoriasis, atherosclerosis, Sjogren's syndrome, progressive systemic sclerosis, scleroderma, acute coronary syndrome, ischemic reperfusion, Crohn's Disease, endometriosis, glomerulonephritis, myasthenia gravis, idiopathic pulmonary fibrosis, asthma, acute respiratory distress syndrome (ARDS), vasculitis, or inflammatory autoimmune myositis. In other certain embodiments, the cardiovascular disease or disorder is atherosclerosis, endocarditis, hypertension, or peripheral ischemic disease. Also provided herein is a method of manufacture for producing the fusion polypeptide comprising a 130L polypeptide fused to an Fc polypeptide as described above and herein.

[0053] All U.S. patents, U.S. patent application publications, U.S. patent applications, foreign patents, foreign patent applications, and non-patent publications referred to in this specification and/or listed in the Application Data Sheet, are incorporated herein by reference, in their entireties.

### BRIEF DESCRIPTION OF THE DRAWINGS

[0054] FIGS. 1A-1F provide an alignment of the amino acid sequence of RPTP-σ (SEQ ID NO:29), RPTP-δ (SEQ ID NO:37), and LAR (SEQ ID NO:25). The leader peptide sequence, the immunoglobulin-like domains (1^{st} Ig domain; 2^{nd} Ig domain, 3^{rd} Ig domain); fibronectin III repeat region (FNIII); transmembrane region (TM region); and phosphatase domains (D1 and D2) of each RPTP are marked in the alignment. The first amino acid of each region is shown in bold typeface. A protease cleavage site in each phosphatase is denoted by underlining. Amino acids in regions of identity are denoted by “*” and amino acids in regions of similarity are indicated by dots. The alignment was generated using the CLUSTALW program (Thompson et al., Nucleic Acids Res. 22:4673-80 (1991)) and “GeneDoc” (Nicholas et al., EMBNEW News 4:14 (1991)).

[0055] FIG. 2 presents a schematic of an A41L fusion polypeptide encoded by a recombinant expression construct (A41LCRFC) for expression of the fusion polypeptide used for tandem affinity purification (TAP). The encoded fusion polypeptide includes mature A41L from Cowpox virus that was fused at its amino terminal end to the carboxy terminus of the human growth hormone leader peptide (GH Leader). The tandem affinity tag (CRFC) was fused to the carboxy terminus of A41L and included a human influenza virus hemagglutinin (HA) epitope (YPYDVDYA, SEQ ID NO:67) in frame with a Protein C-TAG (EDQVDPRLIDGK (SEQ ID NO:68), derived from the heavy chain of human Protein C); human rhinovirus HRV3C protease site (HRV3C cleavage site) (LEVLFQGP (SEQ ID NO:69); and a mutein derivative of the Fc portion of a human IgG immunoglobulin (Mutein FC).

[0056] FIG. 3 presents a schematic of the TAP procedure for identifying cellular polypeptides that bind to A41L.

[0057] FIG. 4 illustrates peptides of LAR, RPTP-δ, and RPTP-σ identified by tandem affinity purification (TAP) with A41L. FIG. 4A illustrates the sequences of peptides (bold typeface) within LAR (SEQ ID NO:70) that were identified by LC/MS/MS after TAP. FIG. 4B illustrates the sequences of peptides (bold typeface) within RPTP-σ (SEQ ID NO:71) that were identified by LC/MS/MS after TAP. FIG. 4C illustrates the sequences of peptides (bold typeface) within RPTP-δ (SEQ ID NO:72) that were identified by LC/MS/MS after TAP.

[0058] FIG. 5 presents an amino acid sequence alignment between (i) an A41L/Fc fusion polypeptide comprising an A41L signal peptide sequence, an A41L polypeptide, and a human IgG1 Fc polypeptide (A41L/Fc) (SEQ ID NO:74) and (ii) an A41L/mutein Fc fusion polypeptide comprising a human growth hormone signal peptide sequence, an A41L polypeptide variant, and a mutein Fc polypeptide (A41L/mutein Fc) (SEQ ID NO:73). The consensus sequence (SEQ ID NO: 75) is also shown. The vertical dotted lines indicate the amino terminal and carboxy terminal ends of the A41L polypeptide.

[0059] FIG. 6 provides an alignment of the amino acid sequence of a 130L polypeptide (GenBank Accession No. CAC21368.1) (SEQ ID NO:85) from Yaba-like Disease Virus (YLDV) and A41L (SEQ ID NO:87) (GenBank Accession No. AAM13618) from Cowpox virus.

[0060] FIG. 7 illustrates peptides of LAR, RPTP-δ, and RPTP-σ identified by tandem affinity purification (TAP) with Yaba-like Disease Virus 130L. FIG. 7A illustrates the sequences of peptides (bold typeface and underlined) within LAR (SEQ ID NO:155) that were identified by LC/MS/MS after TAP. FIG. 7B illustrates the sequences of peptides (bold typeface and underlined) within RPTP-σ (SEQ ID NO:156) that were identified by LC/MS/MS after TAP. FIG. 7C illustrates the sequences of peptides (bold typeface and underlined) within RPTP-δ (SEQ ID NO:157) that were identified by LC/MS/MS after TAP.

[0061] FIG. 8A illustrates interferon-gamma (IFN-γ) production in non-adherent peripheral blood mononuclear cells (PBMCs) in the presence of leukocyte common-antigen-related protein-human Fc conjugate (Lar-hFc). FIG. 8B and 8C present the level of IFN-γ production in a mixed lymphocyte reaction (MLR) in the presence of Lar-hFc. Monocyte derived dendritic cells (10⁴) from donor Do476 (FIG. 8B) and from a second donor Do495 (FIG. 8C) were combined with non-adherent PBMCs to which Lar-hFc at various concentrations was added. Production of IFN-γ was determined by ELISA. Human IgG was added at the concentrations shown as a control.

[0062] FIG. 9 presents the elution profile of an LAR Ig-1-Ig-2-Ig-3-Fc fusion polypeptide that was applied to a gel filtration HPLC column.

[0063] FIG. 10 presents an immunoblot of LAR-Ig domain constructs fused to human IgG Fc, which were combined with A41lL. Complexes were isolated by immunoprecipitation with protein A. The Fc portion of the LAR-Ig-Fc constructs was detected using an anti-Fc antibody (FIG. 10A), and the presence of A41L was determined by immunoblotting with an anti-A41L antibody (FIG. 10B).

### DETAILED DESCRIPTION OF THE INVENTION

[0064] The present invention relates to the discovery that three receptor-like protein tyrosine phosphatases (RPTPs), leukocyte common-antigen-related protein (LAR), receptor protein tyrosine phosphatase-delta (RPTP-δ), and receptor protein tyrosine phosphatase-sigma (RPTP-σ), exhibit an immunoregulatory function. Expression of LAR, RPTP-δ, and RPTP-σ by immune cells was discovered by identifying polypeptides expressed by immune cells that interacted with the poxvirus polypeptides, A41L and 130L from Yaba-like Disease Virus (YLDV).

[0065] The presence of LAR on the cell surface of immune cells (e.g., a macrophages, THP-1 cell line) was shown by identifying cells that expressed polypeptides, which interacted with the poxvirus polypeptide A41L (see, e.g., U.S. Pat. No. 6,852,486). Unexpectedly, as described herein, RPTP-δ and RPTP-σ are also expressed by immune cells and bind to A41L as well as another poxvirus polypeptide 130L. Previous studies indicated that RPTP-δ and RPTP-σ are predominantly expressed in brain and nervous system tissue (see, e.g., Pulido et al., Proc. Natl. Acad. Sci. USA 92:11686-90 (1995)). More recent studies suggest that LAR, RPTP-δ, and RPTP-σ have a role in regulating axon guidance in Drosophila (see, e.g., Johnson et al., Physiol. Rev. 83:1-21 (2003)) and in development and maintenance of excitatory synapses (see, e.g., Dunah et al., Nat. Neurosci. 8:458-67 (2005)).

[0066] The viral polypeptide 130L that specifically binds and/or interacts with LAR, RPTP-δ, and RPTP-σ is not homologous to A41L (see FIG. 6). Yaba-like disease virus (YLDV) belongs to the Yatapoxvirus genus of the Chrodopoxvirinae. The genus has three members: tanapox virus, yaba monkey tumor virus, and YLDV. In primates YLDV causes an acute febrile illness that is characteristically accompanied by localized skin lesions (see, e.g., Knight et al., Virology 172:116-24 (1989)). The YLDV gene called 130L encodes a secreted protein having an estimated molecular weight of approximately 21 Kd (see, e.g., Lee et al., Virology 281:170-92 (2001)).

[0067] Poxvirus polypeptides, such as A41L and 130L, act at least in part in a host infected with a poxvirus to suppress an immune response specific for the virus. The suppression of an immune response in the virally infected host produces an environment in which the virus can continue replication and infection. As described herein, identifying host cells and components of the host cells, including polypeptides, that interact with poxvirus polypeptides such as A41L and 130L may lead to the development of therapeutic molecules that alter an immune response. The poxvirus polypeptides may act by inhibiting or blocking the function of host factors such as interferons, complement, cytokines, and/or chemokines, or by inhibiting, blocking, or altering, the effect of inflammation and fever (see also, e.g., U.S. Pat. No. 6,852,486). For example, in the presence of an LAR-derived polypeptide (i.e., immunoglobulin-like domains 1, 2, and 3 of LAR fused to a human IgG Fc polypeptide), peripheral blood monocytes are stimulated to produce interferon-gamma (IFN-γ). Without wishing to be bound by theory, because IFN-γ is involved in the elimination of pathogens by stimulating and inducing several aspects of the immune response, A41L may inhibit the capability of LAR to contribute to the manifestation of an immune response to the invading poxvirus by inhibiting the capability of LAR to stimulate the production of IFN-γ. Increased IFN-γ production is also associated with immunological diseases and autoimmune diseases, such as systemic lupus erythematosus (SLE). Thus, A41L, 130L, or an agent, macromolecule, or compound that mimics the interaction between A41L or 130L and LAR, for example, may be effective immunosuppressive agents. The poxvirus polypeptides, such as A41L and 130L, or other agents, polypeptides, molecules, or compounds that act like the poxvirus polypeptide to suppress immunoresponsiveness of an immune cell may be used to treat or prevent an immunological disease or disorder.

[0068] Provided herein are compositions and methods for treating diseases and disorders, including inflammatory diseases and autoimmune diseases, by contacting an immune cell with a molecule, compound, or composition that interacts with one or more of LAR, RPTP-δ, and RPTP-σ to inhibit (decrease, abrogate, suppress, prevent) immunoresponsiveness of the immune cell. Such compounds or compositions may also be useful for treating a cardiovascular disease or a metabolic disease as described herein. Alternatively, a molecule, compound, or composition that interacts with one or more of LAR, RPTP-δ, and RPTP-σ and that is useful for treatment an inflammatory or autoimmune disease, a cardiovascular, or a metabolic disease may enhance immunoresponsiveness of the immune system.

[0069] Compositions and methods are provided herein for treating or preventing, inhibiting, slowing the progression of, or reducing the symptoms associated with, an immunological disease or disorder, a cardiovascular disease or disorder, a metabolic disease or disorder, or a proliferative disease or disorder. An immunological disorder includes an inflammatory disease or disorder and an autoimmune disease or disorder. While inflammation or an inflammatory response is a host's normal and protective response to an injury, inflammation can cause undesired damage. For example, atherosclerosis is, at least in part, a pathological response to arterial injury and the consequent inflammatory cascade. Examples of immunological disorders that may be treated with an antibody or antigen-binding fragment thereof (or other agent) that binds to or interacts with one or more of LAR, RPTP-δ, and RPTP-σ described herein include but are not limited to multiple sclerosis, rheumatoid arthritis, systemic lupus erythematosus (SLE), graft versus host disease (GVHD), sepsis, diabetes, psoriasis, atherosclerosis, Sjogren's syndrome, progressive systemic sclerosis, scleroderma, acute coronary syndrome, ischemic reperfusion, Crohn's Disease, endometriosis, glomerulonephritis, myasthenia gravis, idiopathic pulmonary fibrosis, asthma, acute respiratory distress syndrome (ARDS), vasculitis, or inflammatory autoimmune myositis and other inflammatory and muscle degenerative diseases (e.g., dermatomyositis, polymyositis, juvenile dermatomyositis, inclusion body myositis). A cardiovascular disease or disorder that may be treated, which may include a disease and disorder that may also be considered an immunological disease/disorder, includes for example, atherosclerosis, endocarditis, hypertension, or peripheral ischemic disease. A metabolic disease or disorder that may be treated, which may also include a disease and disorder that may also be considered an immunological disease/disorder, includes for example, diabetes, obesity, and diseases associated with abnormal or altered mitochondrial function.

[0070] As used herein, the term “isolated” means that a material is removed from its original environment (e.g., the natural environment if it is naturally occurring). For example, a naturally occurring nucleic acid or polypeptide present in a living animal is not isolated, but the same nucleic acid or polypeptide, separated from some or all of the co-existing materials in the natural system, is isolated. Such a nucleic acid could be part of a vector and/or such nucleic acid or polypeptide could be part of a composition, and still be isolated in that the vector or composition is not part of the natural environment for the nucleic acid or polypeptide. The term “gene” means the segment of DNA involved in producing a polypeptide chain; it includes regions preceding and following the coding region “leader and trailer” as well as intervening sequences (introns) between individual coding segments (exons).

[0071] As used herein and in the appended claims, the singular forms “a,” “and,” and “the” include plural referents unless the context clearly dictates otherwise. Thus, for example, reference to “an agent” includes a plurality of such agents, and reference to “the cell” includes reference to one or more cells and equivalents thereof known to those skilled in the art, and so forth. The term “comprising” (and related terms such as “comprise” or “comprises” or “having” or “including”) is not intended to exclude that in other certain embodiments, for example, an embodiment of any composition of matter, composition, method, or process, or the like, described herein may “consist of” or “consist essentially of” the described features.

A41L Polypeptides

[0072] A41L refers to a genetic locus in viruses that are members of the poxvirus family, including for example, variola, myxoma, Shope fibroma virus, camelpox, monkeypox, ecromelia, cowpox, and vaccinia virus. The A41L gene encodes a glycoprotein (herein called A41L polypeptide) that is a viral virulence factor, which is secreted by cells infected with a poxvirus (see, e.g., International Patent Application Publication WO 98/37217; Ng et al., J. Gen. Virol. 82:2095-105 (2001)). Poxviruses, the genomes of which are double-stranded DNA, have adapted to replicate in various host species by acquiring host genes that permit the viruses to evade the host's immune system and/or to facilitate viral replication (see, e.g., Bugert et al. Virus Genes 21:111-33 (2000); Alcami et al., Immunol. Today 21:447-55 (2000); McFadden et al., J. Leukoc. Biol. 57:731-38 (1995)). Polypeptides encoded by the genomes of various poxviruses may affect an immune response by inhibiting or blocking the function of host factors such interferons, complement, cytokines, and/or chemokines, or by inhibiting, blocking, or altering, the effect of inflammation and fever. For example, a recombinantly expressed A41L polypeptide binds to IFN-γ-induced chemokines, such as Mig and IP-10 (see, e.g., International Patent Application Publication WO 98/37217), and A41L binds to LAR (see, e.g., U.S. Pat. No. 6,852,486).

[0073] An A41L polypeptide as used herein refers to any one of a number of A41L polypeptides (which may be referred to in the art by nomenclature other than A41L) encoded by the genome of any one of a number of poxviruses, including but not limited to variola, myxoma, Shope fibroma virus (rabbit fibroma virus), camelpox, monkeypox, ecromelia, cowpox, and vaccinia virus (see examples of genome sequences (which include nucleotide sequences encoding A41L polypeptides) at GenBank Accession Nos. NC_{—}001559; NC_{—}001611; Y16780; X69198; NC_{—}003310; NC_{—}005337; AY603355; NC_{—}003391; AF438165; U94848; AY243312; AF380138; L22579; M35027; NC_{—}003663; X94355; AF482758; NC_{—}001132; AF170726; NC_{—}001266; AF170722; F36852 (polypeptide only). An A41L polypeptide may comprise any one of the amino acid sequences disclosed herein or known in the art, or a variant of such an amino acid sequence (including orthologues). Exemplary amino acid sequences of A41L polypeptides are set forth in SEQ ID NOs: 1-8 and at GenBank Accession Nos. NP_{—}063835 (SEQ ID NO:10); NP_{—}042191 (SEQ ID NO:11); CAA49088 (SEQ ID NO:12); NP_{—}536578 (SEQ ID NO:13); P33854 (SEQ ID NO:14); P24766 (SEQ ID NO:15); P21064 (SEQ ID NO:16); AA50551 (SEQ ID NO:17); NP_{—}570550 (SEQ ID NO:18); NP-570548 (SEQ ID NO:19); AAL73867 (SEQ ID NO:20); AAL73865 (SEQ ID NO:21).

[0074] An A41L polypeptide may also include an A41L polypeptide variant that comprises an amino acid sequence that differs by at least one amino acid from an A41L polypeptide sequence described herein or known in the art. The A41L polypeptide variant may differ from a wildtype amino acid sequence due to the insertion, deletion, addition, and/or substitution of at least one amino acid and may differ due to the insertion, deletion, addition, and/or substitution of at least two, three, four, five, six, seven, eight, nine, or ten amino acids or may differ by any number of amino acids between 10 and 45 amino acids. A41L polypeptide variants include, for example, naturally occurring polymorphisms (i.e., orthologues A41L polypeptides encoded by the genomes of different poxvirus strains) or recombinantly manipulated or engineered A41L polypeptide variants.

[0075] In certain embodiments, a variant of an A41L polypeptide retains at least one functional or biological activity of the wildtype A41L polypeptide and in other certain embodiments, an A41L polypeptide variant retains at least one, and in certain embodiments, all functions or biological activities of the wildtype A41L polypeptide. A functional or biological activity of an A41L polypeptide or a variant thereof may be determined according to methods described herein and known in the art, which function or activity includes the capability (1) to bind to or interact with at least one of, or at least two of, or all three of the receptor PTPs, LAR, RPTP-δ, and RPTP-σ; (2) to bind to an antibody that specifically binds to a wildtype A41L polypeptide; and (3) to suppress an immune response of a cell expressing at least one of LAR, RPTP-δ, and RPTP-σ. An A41L polypeptide variant that retains a functional or biological activity of a wildtype A41L polypeptide exhibits a comparable level of function or activity (that is, does not differ in a statistically significant manner) to the level of the functional or biological activity exhibited by the wildtype A41L polypeptide.

[0076] A41L polypeptide variants and polynucleotides encoding these variants can be identified by sequence comparison. As used herein, two amino acid sequences have 100% amino acid sequence identity if the amino acid residues of the two amino acid sequences are the same when aligned for maximal correspondence. Similarly, two polynucleotides have 100% nucleotide sequence identity if the nucleotide residues of the two sequences are the same when aligned for maximal correspondence. Sequence comparisons can be performed using any method including using computer algorithms well known to persons having ordinary skill in the art. Such algorithms include Align or the BLAST algorithm (see, e.g., Altschul, J. Mol. Biol. 219:555-565, 1991; Henikoff and Henikoff, Proc. Natl. Acad. Sci. USA 89:10915-10919, 1992), which are available at the NCBI website (see [online] Internet:<URL: http://www/ncbi.nlm.nih.gov/cgi-bin/BLAST). Default parameters may be used. In addition, standard software programs are available, such as those included in the LASERGENE bioinformatics computing suite (DNASTAR, Inc., Madison, Wis.); CLUSTALW program (Thompson et al., Nucleic Acids Res. 22:4673-80 (1991)); and “GeneDoc” (Nicholas et al., EMBNEW News 4:14 (1991)). Other methods for comparing two nucleotide or amino acid sequences by determining optimal alignment are practiced by those having skill in the art (see, for example, Peruski and Peruski, The Internet and the New Biology: Tools for Genomic and Molecular Research (ASM Press, Inc. 1997); Wu et al. (eds.), “Information Superhighway and Computer Databases of Nucleic Acids and Proteins,” in Methods in Gene Biotechnology, pages 123-151 (CRC Press, Inc. 1997); and Bishop (ed.), Guide to Human Genome Computing, 2nd Ed. (Academic Press, Inc. 1998)).

[0077] In certain embodiments, the amino acid sequence of an A41L polypeptide variant is at least 60%, 65%, 70%, 75%, 80%, 85%, 90%, 95%, or 98% identical to the corresponding A41L wildtype polypeptide or to an A41L polypeptide described herein and/or known in the art (see, e.g., SEQ ID NOs: 1-21). Alternatively, an A41L polypeptide variant can be identified by comparing the nucleotide sequence of a polynucleotide encoding the variant with a polynucleotide encoding an A41L polypeptide. In particular embodiments, the nucleotide sequence of a A41L polypeptide variant-encoding polynucleotide is at least 70%, 75%, 80%, 85%, 90%, or 95% identical to one or more of the polynucleotide sequences that encode A41L polypeptides, which are described herein. Polynucleotide variants also include polynucleotides that differ in nucleotide sequence identity due to the degeneracy of the genetic code but encode an A41L polypeptide having an amino acid sequence disclosed herein or known in the art.

[0078] As described herein, an A41L polypeptide, which includes A41L polypeptide variants and fragments and fusion polypeptides as described herein (which interact with or binds to at least one, two, or three of LAR, RPTP-δ, and RPTP-σ, or which interacts with or binds to at least one, two, or three of LAR, RPTP-δ, and RPTP-σ), present on the surface of a cell, may be used to alter (e.g., suppress or enhance) immunoresponsiveness of an immune cell.

[0079] In one embodiment, A41L or a variant thereof or an A41L fusion polypeptide as described herein may be used for treating a patient who presents an acute immune response. For example, an A41L polypeptide, variant, or fragment thereof may suppress an immune response associated with a disease or condition such as acute respiratory distress syndrome (ARDS). ARDS, which may develop in adults and in children, often follows a direct pulmonary or systemic insult (for example, sepsis, pneumonia, aspiration) that injures the alveolar-capillary unit. Several cytokines are associated with development of the syndrome, including, for example, tumor necrosis factor-alpha (TNF-α), interleukin-beta (IL-β), IL-10, and soluble intercellular adhesion molecule 1 (sICAM-1). The increased or decreased level of these factors and cytokines in a biological sample may be readily determined by methods and assays described herein and practiced routinely in the art to monitor the acute state and to monitor the effect of treatment.

[0080] To reduce or minimize the possibility or the extent of an immune response that is specific for A41L, the A41L, A41L variant, derivative, or fragment thereof, may be administered in a limited number of doses, may be produced or derived in a manner that alters glycosylation of A41L, may be administered under conditions that reduce or minimize antigenicity of A41L. For example, A41L may be administered prior to, concurrently with, or subsequent to the administration in the host of a second composition that suppresses an immune response, particularly a response that is specific for A41L. In addition, persons skilled in the art are familiar with methods for increasing the half-life and/or improving the pharmacokinetic properties of a polypeptide, such as by pegylating the polypeptide.

[0081] In certain other embodiments, an A41L polypeptide fragment may alter immunoresponsiveness of an immune cell. Such an A41L fragment interacts with or binds to at least one of, at least two of, or all three of the receptor PTPs, LAR, RPTP-δ, and RPTP-σ. The fragment may comprise at least 6, 7, 8, 9, 10, 11, 12, 13, 14, or 15 consecutive amino acids. In certain embodiments, the A41L fragment comprises at least any number of amino acids between 20 and 50 consecutive amino acids of an A41L polypeptide, and in other embodiments, the A41L fragment comprises at least any number of amino acids between 50 and 100 consecutive amino acids of an A41L polypeptide. A41L fragments also include truncations of an A41L polypeptide. A truncated A41L polypeptide may lack at least 1, 2-10, 11-20, 21-30, 31-40, or 50 amino acids from either the amino terminal end or the carboxy end or from both the amino terminal and carboxy end of a full-length A41L polypeptide. In certain embodiments, the A41L fragment lacks the entire amino terminal half or carboxy terminal half of the full-length A41L polypeptide. In other embodiments, the A41L polypeptide fragment (including a truncated fragment) may be conjugated, fused to, or otherwise linked to a moiety that is not an A41L polypeptide or fragment. For example, the A41L polypeptide fragment may be linked to another molecule capable of altering the immunoresponsiveness of an immune cell (e.g., suppressing the immunoresponsiveness of the immune cell), which immune cell may be the same cell, same type of cell, or a different cell than the cell affected by the A41L polypeptide or fragment.

[0082] An example of an A41L-fusion polypeptide includes an A41L polypeptide, variant, or fragment thereof as described herein fused in frame with an immunoglobulin (Ig) Fc polypeptide. An Fc polypeptide of an immunoglobulin comprises the heavy chain CH2 domain and CH3 domain and a portion of or the entire hinge region that is located between CH1 and CH2. Historically, an Fc fragment was derived by papain digestion of an immunoglobulin and included the hinge region of the immunoglobulin. Fc regions are monomeric polypeptides that may be linked into dimeric or multimeric forms by covalent (e.g., particularly disulfide bonds) and non-covalent association. The number of intermolecular disulfide bonds between monomeric subunits of Fc polypeptides varies depending on the immunoglobulin class (e.g., IgG, IgA, IgE) or subclass (e.g., human IgG1, IgG2, IgG3, IgG4, IgA1, IgA2).

[0083] Fragments of an Fc polypeptide, such as an Fc polypeptide that is truncated at the C-terminal end (that is at least 1, 2, 3, 4, 5, 10, 15, 20, or more amino acids have been removed or deleted), also may be employed. In certain embodiments, the Fc polypeptides described herein contain multiple cysteine residues, such as at least some or all of the cysteine residues in the hinge region, to permit interchain disulfide bonds to form between the Fc polypeptide portions of two separate A41L/Fc fusion proteins, thus forming A41L/Fc fusion polypeptide dimers. In other embodiments, if retention of antibody dependent cell-mediated cytotoxicity (ADCC) and complement fixation (and associated complement associated cytotoxicity (CDC)) is desired, the Fc polypeptide comprises substitutions or deletions of cysteine residues in the hinge region such that an Fc polypeptide fusion protein is monomeric and fails to form a dimer (see, e.g., U.S. Patent Application Publication No. 2005/0175614).

[0084] The Fc portion of the immunoglobulin mediates certain effector functions of an immunoglobulin. Three general categories of effector functions associated with the Fc region include (1) activation of the classical complement cascade, (2) interaction with effector cells, and (3) compartmentalization of immunoglobulins. Presently, an Fc polypeptide, and any one or more constant region domains, and fusion proteins comprising at least one immunoglobulin constant region domain can be readily prepared according to recombinant molecular biology techniques with which a skilled artisan is quite familiar.

[0085] An A41L polypeptide or variant, or fragment thereof, may be fused in frame with an immunoglobulin Fc polypeptide (A41L-Fc fusion polypeptide) that is prepared using the nucleotide and the encoded amino acid sequences derived from the animal species for whose use the A41L-IgFc fusion polypeptide is intended. A person skilled in the molecular biology art can readily prepare such fusion polypeptides according to methods described herein and practiced routinely in the art. In one embodiment, the Fc polypeptide is of human origin and may be from any of the immunoglobulin classes, such as human IgG1, IgG2, IgG3, IgG4, or IgA. In a certain embodiment, the Fc polypeptide is derived from a human IgG1 immunoglobulin (see Kabat et al., supra). In another embodiment, the A41L-Fc fusion polypeptide comprises an Fc polypeptide from a non-human animal, for example, but not limited to, a mouse, rat, rabbit, or hamster. The amino acid sequence of an Fc polypeptide derived from an immunoglobulin of a host species to which an A41L-Fc fusion polypeptide may be administered is likely to be less immunogenic or non-immunogenic than an Fc polypeptide from a non-syngeneic host. As described herein, immunoglobulin sequences of a variety of species are available in the art, for example, in Kabat et al. (in Sequences of Proteins of Immunological Interest, 4th ed., (U.S. Dept. of Health and Human Services, U.S. Government Printing Office, 1991)).

[0086] As described herein an A41L polypeptide (or variant or fragment thereof) that is fused in frame to an Fc polypeptide may comprise any one of the A41L polypeptides disclosed herein or known in the art. For example, an A41L polypeptide having the amino acid sequence of the A41L polypeptide encoded by the genome of the cowpox Brighton Red strain may be fused in frame to an immunoglobulin Fc region. Also as described herein, the Fc portion of the fusion polypeptide may be derived from a human or non-human immunoglobulin. By way of example, the Fc portion of an A41L-Fc fusion polypeptide may comprise the amino acid sequence of all or a portion of the hinge region, CH2 domain, and CH3 domain of a human immunoglobulin, for example, an IgG1. Such an exemplary fusion polypeptide is depicted in FIG. 5. An A41L-Fc fusion polypeptide may further comprise a signal peptide sequence that facilitates post-translational transport of the polypeptide in the host cell in which the fusion polypeptide is expressed. The signal peptide sequence may be derived from an A41L signal peptide sequence encoded by the poxvirus genome from which the A41L sequence was obtained. Alternatively, the signal peptide sequence may comprise an amino acid sequence that is derived from an unrelated polypeptide, such as human growth hormone.

[0087] An Fc polypeptide as described herein also includes Fc polypeptide variants. One such Fc polypeptide variant has one or more cysteine residues (such as one or more cysteine residues in the hinge region) that forms an interchain disulfide bond substituted with another amino acid, such as serine, to reduce the number of interchain disulfide bonds that can form between the two heavy chain constant region polypeptides that form an Fc polypeptide. In addition, or alternatively, the most amino terminal cysteine residue of the hinge region that forms a disulfide bond with a light chain constant region in a complete immunoglobulin molecule may be substituted, for example, with a serine residue. Alternatively, one or more cysteine residues may be deleted from the wildtype hinge of the Fc polypeptide. Another example of an Fc polypeptide variant is a variant that has one or more amino acids involved in an effector function substituted or deleted such that the Fc polypeptide has a reduced level of an effector function. For example, amino acids in the Fc region may be substituted to reduce or abrogate binding of a component of the complement cascade (see, e.g., Duncan et al., Nature 332:563-64 (1988); Morgan et al., Immunology 86:319-24 (1995)) or to reduce or abrogate the ability of the Fc polypeptide to bind to an IgG Fc receptor expressed by an immune cell (Wines et al., J. Immunol. 164:5313-18 (2000); Chappel et al., Proc. Natl. Acad. Sci. USA 88:9036 (1991); Canfield et al., J. Exp. Med. 173:1483 (1991); Duncan et al., supra); or to alter antibody-dependent cellular cytotoxicity. Such an Fc polypeptide variant that differs from the wildtype Fc polypeptide is also called herein a mutein Fc polypeptide.

[0088] In one embodiment, an A41L polypeptide (or fragment or variant thereof) is fused in frame with an Fc polypeptide that comprises at least one substitution of a residue that in the wildtype Fc region polypeptide contributes to binding of an Fc polypeptide or immunoglobulin to one or more IgG Fc receptors expressed on certain immune cells. Such a mutein Fc polypeptide comprises at least one substitution of an amino acid residue in the CH2 domain of the mutein Fc polypeptide, such that the capability of the fusion polypeptide to bind to an IgG Fc receptor, such as an IgG Fc receptor present on the surface of an immune cell, is reduced.

[0089] By way of background, on human leukocytes three distinct types of Fc IgG-receptors are expressed that are distinguishable by structural and functional properties, as well as by antigenic structures, which differences are detected by CD specific monoclonal antibodies. The IgG Fc receptors are designated FcγRI (CD64), FcγRII (CD32), and FcγRIII (CD16) and are differentially expressed on overlapping subsets of leukocytes.

[0090] FcγRI (CD64), a high-affinity receptor expressed on monocytes, macrophages, neutrophils, myeloid precursors, and dendritic cells, comprises isoforms Ia and Ib. FcγRII (CD32), comprised of isoforms IIa, IIb1, IIb2, IIb3, and IIc, is a low-affinity receptor that is the most widely distributed human FcγR type; it is expressed on most types of blood leukocytes, as well as on Langerhans cells, dendritic cells, and platelets. FcγRIII (CD16) has two isoforms, both of which are capable of binding to human IgG1 and IgG3. The FcyRIIIa isoform has an intermediate affinity for IgG and is expressed on macrophages, monocytes, natural killer (NK) cells, and subsets of T cells. FcγRlllb is a low-affinity receptor for IgG and is selectively expressed on neutrophils.

[0091] Residues in the amino terminal portion of the CH2 domain that contribute to IgG Fc receptor binding include residues at positions Leu234-Ser239 (Leu-Leu-Gly-Gly-Pro-Ser (SEQ ID NO:80) (EU numbering system, Kabat et al., supra) (see, e.g., Morgan et al., Immunology 86:319-24 (1995), and references cited therein). These positions correspond to positions 15-20 of the amino acid sequence of a human IgG1 Fc polypeptide (SEQ ID NO:79). Substitution of the amino acid at one or more of these six positions (i.e., one, two, three, four, five, or all six) in the CH2 domain results in a reduction of the capability of the Fc polypeptide to bind to one or more of the IgG Fc receptors (or isoforms thereof) (see, e.g., Burton et al., Adv. Immunol. 51:1 (1992); Hulett et al., Adv. Immunol. 57:1 (1994); Jefferis et al., Immunol. Rev. 163:59 (1998); Lund et al., J. Immunol. 147:2657 (1991); Sarmay et al., Mol. Immunol. 29:633 (1992); Lund et al., Mol. Immunol. 29:53 (1992); Morgan et al., supra). In addition to substitution of one or more amino acids at EU positions 234-239, one, two, or three or more amino acids adjacent to this region (either to the carboxy terminal side of position 239 or to the amino terminal side of position 234) may also be substituted.

[0092] By way of example, substitution of the leucine residue at position 235 (which corresponds to position 16 of SEQ ID NO:79) with a glutamic acid residue or an alanine residue abolishes or reduces, respectively, the affinity of an immunoglobulin (such as human IgG3) for FcγRI (Lund et al., 1991, supra; Canfield et al., supra; Morgan et al., supra). As another example, replacement of the leucine residues at positions 234 and 235 (which correspond to positions 15 and 16 of SEQ ID NO:79), for example, with alanine residues, abrogates binding of an immunoglobulin to FcγRIIa (see, e.g., Wines et al., supra). Alternatively, leucine at position 234 (which corresponds to position 15 of SEQ ID NO:79), leucine at position 235 (which corresponds to position 16 of SEQ ID NO:79), and glycine at position 237 (which corresponds to position 18 of SEQ ID NO:79), each may be substituted with a different amino acid, such as leucine at position 234 may be substituted with an alanine residue (L234A), leucine at 235 may be substituted with an alanine residue (L235A) or with a glutamic acid residue (L235E), and the glycine residue at position 237 may be substituted with another amino acid, for example an alanine residue (G237A).

[0093] In one embodiment, a mutein Fc polypeptide that is fused in frame to a viral polypeptide (or variant or fragment thereof) comprises one, two, three, four, five, or six mutations at positions 15-20 of SEQ ID NO:79 that correspond to positions 234-239 of a human IgG1 CH2 domain (EU numbering system) as described herein. An exemplary mutein Fc polypeptide has the amino acid sequence set forth in SEQ ID NO:77 in which substitutions corresponding to (L234A), (L235E), and (G237A) may be found at positions 13, 14, and 16 of SEQ ID NO:77.

[0094] In another embodiment, a mutein Fc polypeptide comprises a mutation of a cysteine residue in the hinge region of an Fc polypeptide. In one embodiment, the cysteine residue most proximal to the amino terminus of the hinge region of an Fc polypeptide (e.g., for example, the cysteine residue most proximal to the amino terminus of the hinge region of the Fc portion of a wildtype IgG1 immunoglobulin) is deleted or substituted with another amino acid. That is, by way of illustration, the cysteine residue at position 1 of SEQ ID NO:79 is deleted, or the cysteine residue at position 1 is substituted with another amino acid that is incapable of forming a disulfide bond, for example, with a serine residue. In another embodiment, a mutein Fc polypeptide comprises a deletion or substitution of the cysteine residue most proximal to the amino terminus of the hinge region of an Fc polypeptide further comprises deletion or substitution of the adjacent C-terminal amino acid. In a certain embodiment, this cysteine residue and the adjacent C-terminal residue are both deleted from the hinge region of a mutein Fc polypeptide. In a specific embodiment, the cysteine residue at position 1 of SEQ ID NO:79 and the aspartic acid at position 2 of SEQ ID NO:79 are deleted. Fc polypeptides that comprise deletion of these cysteine and aspartic acid residues in the hinge region may be efficiently expressed in a host cell, and in certain instances, may be more efficiently expressed in a cell than an Fc polypeptide that retains the wildtype cysteine and aspartate residues.

[0095] In a specific embodiment, a mutein Fc polypeptide comprises the amino acid sequence set forth in SEQ ID NO:77, which differs from the wildtype Fc polypeptide (SEQ ID NO:79) wherein the cysteine residue at position 1 of SEQ ID NO:79 is deleted and the aspartic acid at position 2 of SEQ ID NO:79 is deleted and the leucine reside at position 15 of SEQ ID NO:79 is substituted with an alanine residue, the leucine residue at position 16 is substituted with a glutamic acid residue, and the glycine at position 18 is substituted with an alanine residue (see also FIG. 5). Thus, an exemplary mutein Fc polypeptide comprises an amino acid sequence at its amino terminal portion of KTHTCPPCPAPEAEGAPS (SEQ ID NO:81) (see SEQ ID NO:77, an exemplary Fc mutein sequence).

[0096] Other Fc variants encompass similar amino acid sequences of known Fc polypeptide sequences that have only minor changes, for example by way of illustration and not limitation, covalent chemical modifications, insertions, deletions and/or substitutions, which may further include conservative substitutions. Amino acid sequences that are similar to one another may share substantial regions of sequence homology. Similarly, nucleotide sequences that encode the Fc variants may encompass substantially similar nucleotide sequences and have only minor changes, for example by way of illustration and not limitation, covalent chemical modifications, insertions, deletions, and/or substitutions, which may further include silent mutations owing to degeneracy of the genetic code. Nucleotide sequences that are similar to one another may share substantial regions of sequence homology.

[0097] An Fc polypeptide or at least one immunogloblulin constant region, or portion thereof, when fused to a peptide or polypeptide of interest acts, at least in part, as a vehicle or carrier moiety that prevents degradation and/or increases half-life, reduces toxicity, reduces immunogenicity, and/or increases biological activity of the peptide such as by forming dimers or other multimers (see, e.g., U.S. Pat. Nos. 6,018,026; 6,291,646; 6,323,323; 6,300,099; 5,843,725). (See also, e.g., U.S. Pat. No. 5,428,130; U.S. Pat. No. 6,660,843; U.S. Patent Application Publication Nos. 2003/064480; 2001/053539; 2004/087778; 2004/077022; 2004/071712; 2004/057953/ 2004/053845/ 2004/044188; 2004/001853; 2004/082039).

[0098] An A41L polypeptide (or variant or fragment thereof) fused in frame with an Fc polypeptide or Fc polypeptide variant (e.g., a mutein Fc polypeptide) may comprise a peptide linker between the A41L polypeptide and Fc polypeptide. The linker may be a single amino acid (such as for example a glycine residue) or may be two, three, four, five, six, seven, eight, nine, or ten amino acids, or may be any number of amino acids between 10 and 20 amino acids. By way of illustration but not limitation, a linker may comprise at least two amino acids that are encoded by a nucleotide sequence that is a restriction enzyme recognition site. Examples of such restriction enzyme recognition sites include, for example, BamHI, ClaI, EcoRI, HindIII, KpnI, NcoI, NheI, PmlI, PstI, SalI, and XhoI.

[0099] An A41L polypeptide, fragment thereof, or variant thereof, fused in frame with a mutein Fc polypeptide may be used to suppress an immune response in a subject when administered with a pharmaceutically or physiologically suitable carrier or excipient according to methods described herein and known to practitioners in the medical art. Such fusion polypeptides may alter a biological activity of at least one of the RPTP polypeptides described herein (i.e., LAR, RPTP-σ, RPTP-δ), at least two of the RPTP polypeptides or all three RPTP polypeptides. In certain embodiments, an A41L polypeptide, fragment thereof, or variant thereof, fused in frame with a mutein Fc polypeptide is used for treating an immunological disease or disorder (including an autoimmune disease or an inflammatory disease), which are described in detail herein. As described herein, the A41I/mutein Fc polypeptides may also be used to treat a disease or disorder associated with alteration of cell migration, cell proliferation, or cell differentiation, which includes but is not limited to an immunological disease or disorder, a cardiovascular disease or disorder, a metabolic disease or disorder, or a proliferative disease or disorder.

[0100] A41L polypeptide fragments include A41L polypeptide variant fragments. A41L polypeptide fragments also include A41L fragments having an amino acid sequence that differs from the full-length A41L from which the fragments were derived, that is the A41L polypeptide fragment variant has at least 99%, 98%, 97%, 95%, 90%, 87%, 85%, or 80% amino acid sequence identity with a portion of the full-length A41L polypeptide. Variants of A41L polypeptide fragments that have the capability to alter (suppress or enhance) the immunoresponsiveness of an immune cell retain comparable capability to alter the immunoresponsiveness of an immune cell.

[0101] A41L polypeptide variants and A41L polypeptide fragment variants that retain the capability to alter immunoresponsiveness of an immune cell include variants that contain conservative amino acid substitutions. A variety of criteria known to persons skilled in the art indicate whether amino acids at a particular position in a peptide or polypeptide are conservative (or similar). For example, a similar amino acid or a conservative amino acid substitution is one in which an amino acid residue is replaced with an amino acid residue having a similar side chain, such as amino acids with basic side chains (e.g., lysine, arginine, histidine); acidic side chains (e.g., aspartic acid, glutamic acid); uncharged polar side chains (e.g., glycine, asparagine, glutamine, serine, threonine, tyrosine, cysteine, histidine); nonpolar side chains (e.g., alanine, valine, leucine, isoleucine, proline, phenylalanine, methionine, tryptophan); beta-branched side chains (e.g., threonine, valine, isoleucine), and aromatic side chains (e.g., tyrosine, phenylalanine, tryptophan). Proline, which is considered more difficult to classify, shares properties with amino acids that have aliphatic side chains (e.g., leucine, valine, isoleucine, and alanine). In certain circumstances, substitution of glutamine for glutamic acid or asparagine for aspartic acid may be considered a similar substitution in that glutamine and asparagine are amide derivatives of glutamic acid and aspartic acid, respectively. As understood in the art “similarity” between two polypeptides is determined by comparing the amino acid sequence and conserved amino acid substitutes thereto of the polypeptide to the sequence of a second polypeptide (e.g., using GENEWORKS, Align, or the BLAST algorithm, as described herein). By way of example, an A41L variant described herein has a conservative substitution of an arginine residue with a lysine residue at position 50 of SEQ ID NO:82 (GenBank Acc. No. AAM13618, May 20, 2003) to provide SEQ ID NO:83 (see also, e.g., Hu et al., Virology 181:716-20 (1991); Hu et al., Virology 204:343-56 (1994)). This A41L variant retains the functions and properties of the wild type A41L polypeptide.

[0102] An A41L polypeptide variant also includes a variant that interacts with or binds to only one or two (i.e., LAR and RPTP-δ, LAR and RPTP-σ, or RPTP-δ and RPTP-σ) but not all three of LAR, RPTP-δ, and RPTP-σ. Such a variant comprises at least 1, 2, 3, 4, 5, 6, 7, 8, 9, 10, 11-15, 16-25, 26-35, or 36-45 amino acid substitutions, deletions, or insertions compared with the wildtype A41L polypeptide. Binding of A41L to each of the RPTPs may be determining according to methods described herein and practiced in the art. The source of the polypeptides for binding studies include, for example, isolated A41L and RPTPs, or fragments thereof, or individual cell lines capable of recombinant expression of one of A41L, LAR, RPTP-δ, and RPTP-σ.

[0103] Variants of A41L full-length polypeptides or A41L fragments may be readily prepared by genetic engineering and recombinant molecular biology methods and techniques. Analysis of the primary and secondary amino acid sequence of an A41L polypeptide and computer modeling to analyze the tertiary structure of the polypeptide may aid in identifying specific amino acid residues that can be substituted without altering the structure and as a consequence, potentially the function, of the A41L polypeptide. Modification of DNA encoding an A41L polypeptide or fragment may be performed by a variety of methods, including site-specific or site-directed mutagenesis of the DNA, which methods include DNA amplification using primers to introduce and amplify alterations in the DNA template, such as PCR splicing by overlap extension (SOE). Mutations may be introduced at a particular location by synthesizing oligonucleotides containing a mutant sequence, flanked by restriction sites enabling ligation to fragments of the native sequence. Following ligation, the resulting reconstructed sequence encodes a variant (or derivative) having the desired amino acid insertion, substitution, or deletion.

[0104] Site-directed mutagenesis is typically effected using a phage vector that has single- and double-stranded forms, such as an M13 phage vector, which is well-known and commercially available. Other suitable vectors that contain a single-stranded phage origin of replication may be used (see, e.g., Veira et al., Meth. Enzymol. 15:3 (1987)). In general, site-directed mutagenesis is performed by preparing a single-stranded vector that encodes the protein of interest. An oligonucleotide primer that contains the desired mutation within a region of homology to the DNA in the single-stranded vector is annealed to the vector followed by addition of a DNA polymerase, such as E. coli DNA polymerase I (Klenow fragment), which uses the double stranded region as a primer to produce a heteroduplex in which one strand encodes the altered sequence and the other the original sequence. Additional disclosure relating to site-directed mutagenesis may be found, for example, in Kunkel et al. (Meth. Enzymol. 154:367 (1987)) and in U.S. Pat. Nos. 4,518,584 and 4,737,462. The heteroduplex is introduced into appropriate bacterial cells, and clones that include the desired mutation are selected. The resulting altered DNA molecules may be expressed recombinantly in appropriate host cells to produce the variant, modified protein.

[0105] Oligonucleotide-directed site-specific (or segment specific) mutagenesis procedures may be employed to provide an altered polynucleotide that has particular codons altered according to the substitution, deletion, or insertion desired. Deletion or truncation derivatives of proteins may also be constructed by using convenient restriction endonuclease sites adjacent to the desired deletion. Subsequent to restriction, overhangs may be filled in and the DNA religated. Exemplary methods of making the alterations set forth above are disclosed by Sambrook et al. (Molecular Cloning: A Laboratory Manual, 3d ed., Cold Spring Harbor Laboratory Press, N.Y. 2001). Alternatively, random mutagenesis techniques, such as alanine scanning mutagenesis, error prone polymerase chain reaction mutagenesis, and oligonucleotide-directed mutagenesis may be used to prepare A41L polypeptide variants and fragment variants (see, e.g., Sambrook et al., supra).

[0106] Assays for assessing whether the variant folds into a conformation comparable to the non-variant polypeptide or fragment include, for example, the ability of the protein to react with mono- or polyclonal antibodies that are specific for native or unfolded epitopes, the retention of ligand-binding functions, and the sensitivity or resistance of the mutant protein to digestion with proteases (see Sambrook et al., supra). A41L variants as described herein can be identified, characterized, and/or made according to these methods described herein or other methods known in the art, which are routinely practiced by persons skilled in the art.

[0107] Mutations that are made or identified in the nucleic acid molecules encoding an A41L polypeptide preferably preserve the reading frame of the coding sequences. Furthermore, the mutations will preferably not create complementary regions that when transcribed could hybridize to produce secondary mRNA structures, such as loops or hairpins, that would adversely affect translation of the mRNA. Although a mutation site may be predetermined, the nature of the mutation per se need not be predetermined. For example, to select for optimum characteristics of a mutation at a given site, random mutagenesis may be conducted at the target codon and the expressed mutants screened for gain or loss or retention of biological activity.

[0108] An A41L polynucleotide is any polynucleotide that encodes an A41L polypeptide or at least a portion (or fragment) of an A41L polypeptide or a variant thereof, or that is complementary to such a polynucleotide. The nucleotide sequences of polynucleotides that encode A41L, or its orthologues, may be found, for example, in the genomic sequences of poxviruses provided in GenBank entries for which Accession numbers are provided herein, in GenBank Accession Nos. NC_{—}001559; NC_{—}001611; Y16780; X69198; NC_{—}003310; NC_{—}005337; AY603355; NC_{—}003391; AF438165; U94848; AY243312; AF380138; L22579; M35027; NC_{—}003663; X94355; AF482758; NC_{—}001132; AF170726; NC_{—}001266; AF170722 and that can be deduced from the amino acid sequences disclosed herein (e.g., SEQ ID NOs:1-21). Polynucleotides comprise at least 15 consecutive nucleotides or at least 30, 35, 40, 50, 55, or 60 consecutive nucleotides, in certain embodiments at least 70, 75, 80, 90, 100, 110, 120, 125, or 130 consecutive nucleotides, and in other embodiments at least 135, 140, 145, 150, 155, 160, or 170 consecutive nucleotides, and in other embodiments at least 180, 190, 200, 225, 250, 275, 300, 325, 350, 375, 400, 405, 410, 420, 425, 445, 450, 475, 500, 525, 530, 545, 550, 575, 600, 625, 650, or 660 consecutive nucleotides that include sequences encoding an A41L polypeptide, or nucleotide sequences that are complementary to such a sequence. Certain polynucleotides that encode an A41L polypeptide, variant, or fragment thereof may also be used as probes, primers, short interfering RNA (siRNA), or antisense oligonucleotides, as described herein. Polynucleotides may be single-stranded DNA or RNA (coding or antisense) or double-stranded RNA (e.g., genomic or synthetic) or DNA (e.g., cDNA or synthetic).

[0109] Polynucleotide variants may also be identified by hybridization methods. Suitable moderately stringent conditions include, for example, pre-washing in a solution of 5×SSC, 0.5% SDS, 1.0 mM EDTA (pH 8.0); hybridizing at 50° C.-70° C., 5×SSC for 1-16 hours; followed by washing once or twice at 22-65° C. for 20-40 minutes with one or more each of 2×, 0.5×, and 0.2×SSC containing 0.05-0.1% SDS. For additional stringency, conditions may include a wash in 0.1×SSC and 0.1% SDS at 50-60° C. for 15 minutes. As understood by persons having ordinary skill in the art, variations in stringency of hybridization conditions may be achieved by altering the time, temperature, and/or concentration of the solutions used for pre-hybridization, hybridization, and wash steps. Suitable conditions may also depend in part on the particular nucleotide sequences of the probe used (i.e., for example, the guanine plus cytosine (G/C) versus adenine plus thymidine (A/T) content). Accordingly, a person skilled in the art will appreciate that suitably stringent conditions can be readily selected without undue experimentation when a desired selectivity of the probe is identified.

130L Polypeptides

[0110] As described herein the 130L gene encodes a glycoprotein (herein called 130L polypeptide) that is likely a viral virulence factor and that is secreted by cells infected with YLDV. Similar to other poxviruses, the genome of YLDV is double-stranded DNA, and has the virus has adapted to replicate in various host species by acquiring host genes that permit the viruses to evade the host's immune system and/ or to facilitate viral replication (see, e.g., Najarro et al., J. Gen. Virol. 84:3325-36 (2003)). Polypeptides encoded by the genomes of various poxviruses may affect an immune response by inhibiting or blocking the function of host factors such interferons, complement, cytokines, and/or chemokines, or by inhibiting, blocking, or altering, the effect of inflammation and fever.

[0111] A 130L polypeptide as used herein refers to any one of a number of 130L polypeptides encoded by the genome of the yatapoxvirus Yaba-like disease virus (see examples of genome sequences (which include nucleotide sequences encoding 130L polypeptides) for Yaba-like disease virus at GenBank Accession Nos. AJ293568.1 and NC_{—}002642.1). A 130L polypeptide may comprise any one of the amino acid sequences disclosed herein or known in the art, or a variant of such an amino acid sequence (including orthologues). Exemplary amino acid sequences of 130L polypeptides are set forth in SEQ ID NO:85 (see GenBank Accession No. CAC21368.1) and GenBank Accession No. NP_{—}073515.1 (SEQ ID NO:144).

[0112] A 130L polypeptide may also include a 130L polypeptide variant that comprises an amino acid sequence that differs by at least one amino acid from a 130L polypeptide sequence described herein or known in the art. The 130L polypeptide variant may differ from a wildtype amino acid sequence due to the insertion, deletion, addition, and/or substitution of at least one amino acid and may differ due to the insertion, deletion, addition, and/or substitution of at least two, three, four, five, six, seven, eight, nine, or ten amino acids or may differ by any number of amino acids between 10 and 45 amino acids. 130L polypeptide variants include, for example, a naturally occurring polymorphism (i.e., orthologues of 130L polypeptides encoded by the genomes of different yatapoxvirus strains) or recombinantly manipulated or engineered 130L polypeptide variants.

[0113] In certain embodiments, a variant of a 130L polypeptide retains at least one functional or biological activity of the wildtype 130L polypeptide and in other certain embodiments, a 130L polypeptide variant retains at least one, and in certain embodiments, all functions or biological activities of the wildtype 130L polypeptide. A functional or biological activity of 130L polypeptide or a variant thereof may be determined according to methods described herein and known in the art, which function or activity includes the capability (1) to bind to or interact with at least one of, or at least two of, or all three of the receptor PTPs, LAR, RPTP-δ, and RPTP-σ; (2) to bind to an antibody that specifically binds to a wildtype 130L polypeptide; and (3) to suppress an immune response of a cell expressing at least one of LAR, RPTP-δ, and RPTP-σ. A 130L polypeptide variant that retains a functional or biological activity of a wildtype 130L polypeptide exhibits a comparable level of function or activity (that is, does not differ in a statistically significant or biologically significant manner) to the level of the functional or biological activity exhibited by the wildtype 130L polypeptide.

[0114] 130L polypeptide variants and polynucleotides encoding these variants can be identified by sequence comparison. As used herein, two amino acid sequences have 100% amino acid sequence identity if the amino acid residues of the two amino acid sequences are the same when aligned for maximal correspondence. Similarly, two polynucleotides have 100% nucleotide sequence identity if the nucleotide residues of the two sequences are the same when aligned for maximal correspondence. Sequence comparisons can be performed using any method including using computer algorithms well known to persons having ordinary skill in the art. Such algorithms include Align or the BLAST algorithm (see, e.g., Altschul, J. Mol. Biol. 219:555-565, 1991; Henikoff and Henikoff, Proc. Natl. Acad. Sci. USA 89:10915-10919, 1992), which are available at the NCBI website (see [online] Internet:<URL: http://www/ncbi.nlm.nih.gov/cgi-bin/BLAST). Default parameters may be used. In addition, standard software programs are available, such as those included in the LASERGENE bioinformatics computing suite (DNASTAR, Inc., Madison, Wis.); CLUSTALW program (Thompson et al., Nucleic Acids Res. 22:4673-80(1991)); and “GeneDoc” (Nicholas et al., EMBNEW News 4:14 (1991)). Other methods for comparing two nucleotide or amino acid sequences by determining optimal alignment are practiced by those having skill in the art (see, for example, Peruski and Peruski, The Internet and the New Biology: Tools for Genomic and Molecular Research (ASM Press, Inc. 1997); Wu et al. (eds.), “Information Superhighway and Computer Databases of Nucleic Acids and Proteins,” in Methods in Gene Biotechnology, pages 123-151 (CRC Press, Inc. 1997); and Bishop (ed.), Guide to Human Genome Computing, 2nd Ed. (Academic Press, Inc. 1998)).

[0115] In certain embodiments, the amino acid sequence of a 130L polypeptide variant is at least 60%, 65%, 70%, 75%, 80%, 85%, 90%, 95%, or 98% identical to the corresponding 130L wildtype polypeptide or to a 130L polypeptide described herein and/or known in the art (see, e.g., SEQ ID NO:85 (which has the signal peptide sequence (SEQ ID NO:151)) or SEQ ID NO:150 (mature 130L polypeptide)). Alternatively, a 130L polypeptide variant can be identified by comparing the nucleotide sequence of a polynucleotide encoding the variant with a polynucleotide encoding a 130L polypeptide. In particular embodiments, the nucleotide sequence of a 130L polypeptide variant-encoding polynucleotide is at least 70%, 75%, 80%, 85%, 90%, or 95% identical to one or more of the polynucleotide sequences that encode 130L polypeptides, which are described herein. Polynucleotide variants also include polynucleotides that differ in nucleotide sequence identity due to the degeneracy of the genetic code but encode a 130L polypeptide having an amino acid sequence disclosed herein or known in the art.

[0116] As described herein, a 130L polypeptide, which includes 130L polypeptide variants and fragments and fusion polypeptides as described herein (which interact with or binds to at least one, two, or three of LAR, RPTP-δ, and RPTP-σ), present on the surface of a cell, may be used to alter (e.g., suppress or enhance) immunoresponsiveness of an immune cell. In one embodiment, a 130L polypeptide or a variant thereof or a 130L fusion polypeptide as described herein may be used for treating a patient who presents an acute immune response. For example, a 130L polypeptide, variant, or fragment thereof may suppress an immune response associated with a disease or condition such as acute respiratory distress syndrome (ARDS). ARDS, which may develop in adults and in children, often follows a direct pulmonary or systemic insult (for example, sepsis, pneumonia, aspiration) that injures the alveolar-capillary unit. Several cytokines are associated with development of the syndrome, including, for example, tumor necrosis factor-alpha (TNF-α), interleukin-beta (IL-β), IL-10, and soluble intercellular adhesion molecule 1 (sICAM- 1). The increased or decreased level of these factors and cytokines in a biological sample may be readily determined by methods and assays described herein and practiced routinely in the art to monitor the acute state and to monitor the effect of treatment.

[0117] To reduce or minimize the possibility or the extent of an immune response that is specific for 130L, the 130L polypeptide, 130L variant, derivative, or fragment thereof, or fusion protein comprising same may be administered in a limited number of doses, may be produced or derived in a manner that alters glycosylation of 130L, and/or may be administered under conditions that reduce or minimize antigenicity of 130L. For example, 130L may be administered prior to, concurrently with, or subsequent to the administration in the host of a second composition that suppresses an immune response, particularly a response that is specific for 130L.

[0118] In certain other embodiments, a 130L polypeptide fragment may alter immunoresponsiveness of an immune cell. Such a 130L fragment interacts with or binds to at least one of, at least two of, or all three of the receptor PTPs, LAR, RPTP-δ, and RPTP-σ. The fragment may comprise at least 6, 7, 8, 9, 10, 11, 12, 13, 14, or 15 consecutive amino acids. In certain embodiments, the 130L fragment comprises at least any number of amino acids between 20 and 50 consecutive amino acids of a 130L polypeptide, and in other embodiments, the 130L fragment comprises at least any number of amino acids between 50 and 100 consecutive amino acids of a 130L polypeptide. 130L fragments also include truncations of a 130L polypeptide. A truncated 130L polypeptide may lack at least 1, 2-10, 11-20, 21-30, 31-40, or 50 amino acids from either the amino terminal end or the carboxy end or from both the amino terminal and carboxy end of a full-length 130L polypeptide. In certain embodiments, the 130L fragment lacks the entire amino terminal half or carboxy terminal half of the full-length 130L polypeptide. In other embodiments, the 130L polypeptide fragment (including a truncated fragment) may be conjugated, fused to, or otherwise linked to a moiety that is not a 130L polypeptide or fragment. For example, the 130L polypeptide fragment may be linked to another molecule capable of altering the immunoresponsiveness of an immune cell (e.g., suppressing the immunoresponsiveness of the immune cell), which immune cell may be the same cell, same type of cell, or a different cell than the cell affected by the 130L polypeptide or fragment. In addition, persons skilled in the art are familiar with methods for increasing the half-life and/or improving the pharmacokinetic properties of a polypeptide, such as by pegylating the polypeptide.

[0119] An example of a 130L-fusion polypeptide includes a 130L polypeptide, variant, or fragment thereof as described herein fused in frame with an immunoglobulin (Ig) Fc polypeptide. An Fc polypeptide of an immunoglobulin comprises the heavy chain CH2 domain and CH3 domain and a portion of or the entire hinge region that is located between CH1 and CH2. Historically, an Fc fragment was derived by papain digestion of an immunoglobulin and included the hinge region of the immunoglobulin. Fc regions are monomeric polypeptides that may be linked into dimeric or multimeric forms by covalent (e.g., particularly disulfide bonds) and non-covalent association. The number of intermolecular disulfide bonds between monomeric subunits of Fc polypeptides varies depending on the immunoglobulin class (e.g., IgG, IgA, IgE) or subclass (e.g., human IgG1, IgG2, IgG3, IgG4, IgA1, IgGA2).

[0120] Fragments of an Fc polypeptide, such as an Fc polypeptide that is truncated at the C-terminal end (that is at least 1, 2, 3, 4, 5, 10, 15, 20, or more amino acids have been removed or deleted), also may be employed. In certain embodiments, the Fc polypeptides described herein contain multiple cysteine residues, such as at least some or all of the cysteine residues in the hinge region, to permit interchain disulfide bonds to form between the Fc polypeptide portions of two separate 130L/Fc fusion proteins, thus forming 130L/Fc fusion polypeptide dimers. In other embodiments, if retention of antibody dependent cell-mediated cytotoxicity (ADCC) and complement fixation (and associated complement associated cytotoxicity (CDC)) is desired, the Fc polypeptide comprises substitutions or deletions of cysteine residues in the hinge region such that an Fc polypeptide fusion protein is monomeric and fails to form a dimer (see, e.g., U.S. Patent Application Publication No. 2005/0175614).

[0121] The Fc portion of the immunoglobulin mediates certain effector functions of an immunoglobulin. Three general categories of effector functions associated with the Fc region include (1) activation of the classical complement cascade, (2) interaction with effector cells, and (3) compartmentalization of immunoglobulins. Presently, an Fc polypeptide, and any one or more constant region domains, and fusion proteins comprising at least one immunoglobulin constant region domain can be readily prepared according to recombinant molecular biology techniques with which a skilled artisan is quite familiar.

[0122] A 130L polypeptide or variant, or fragment thereof, may be fused in frame with an immunoglobulin Fc polypeptide (130L-Fc fusion polypeptide) that is prepared using the nucleotide and the encoded amino acid sequences derived from the animal species for whose use the 130L-IgFc fusion polypeptide is intended. A person skilled in the molecular biology art can readily prepare such fusion polypeptides according to methods described herein and practiced routinely in the art. In one embodiment, the Fc polypeptide is of human origin and may be from any of the immunoglobulin classes and subclasses, such as human IgG1, IgG2, IgG3, IgG4, or IgA. In a certain embodiment, the Fc polypeptide is derived from a human IgG1 immunoglobulin (see Kabat et al., supra). In another embodiment, the 130L-Fc fusion polypeptide comprises an Fc polypeptide from a non-human animal, for example, but not limited to, a mouse, rat, rabbit, or hamster. The amino acid sequence of an Fc polypeptide derived from an immunoglobulin of a host species to which a 130L-Fc fusion polypeptide may be administered is likely to be less immunogenic or non-immunogenic than an Fc polypeptide from a non-syngeneic host. As described herein, immunoglobulin sequences of a variety of species are available in the art, for example, in Kabat et al. (in Sequences of Proteins of Immunological Interest, 4th ed., (U.S. Dept. of Health and Human Services, U.S. Government Printing Office, 1991)).

[0123] As described herein a 130L polypeptide (or variant or fragment thereof) that is fused to an Fc polypeptide may comprise any one of the 130L polypeptides disclosed herein or known in the art. For example, a 130L polypeptide having the amino acid sequence of the 130L polypeptide encoded by the genome of a Yaba-like disease virus (see, e.g., GenBank Accession Nos. AJ293568.1 and NC_{—}002642) may be fused to an immunoglobulin Fc region (see, e.g., SEQ ID NO:154). Also as described herein, the Fc portion of the fusion polypeptide may be derived from a human or non-human immunoglobulin. By way of example, the Fc portion of a 130L-Fc fusion polypeptide may comprise the amino acid sequence of all or a portion of the hinge region, CH2 domain, and CH3 domain of a human immunoglobulin, for example, an IgG1. A 130L-Fc fusion polypeptide may further comprise a signal peptide sequence that facilitates post-translational transport of the polypeptide in the host cell in which the fusion polypeptide is expressed. The signal peptide sequence may be derived from a 130L signal peptide sequence encoded by the poxvirus genome from which the 130L sequence was obtained. Alternatively, the signal peptide sequence may comprise an amino acid sequence that is derived from an unrelated polypeptide, such as human growth hormone.

[0124] An Fc polypeptide as described herein also includes Fc polypeptide variants. One such Fc polypeptide variant has one or more cysteine residues (such as one or more cysteine residues in the hinge region) that forms an interchain disulfide bond substituted with another amino acid, such as serine, to reduce the number of interchain disulfide bonds that can form between the two heavy chain constant region polypeptides that form an Fc polypeptide. In addition, or alternatively, the most amino terminal cysteine residue of the hinge region that forms a disulfide bond with a light chain constant region in a complete immunoglobulin molecule may be substituted, for example, with a serine residue. Alternatively, one or more cysteine residues may be deleted from the wildtype hinge of the Fc polypeptide. Another example of an Fc polypeptide variant is a variant that has one or more amino acids involved in an effector function substituted or deleted such that the Fc polypeptide has a reduced level of an effector function. For example, amino acids in the Fc region may be substituted to reduce or abrogate binding of a component of the complement cascade (see, e.g., Duncan et al., Nature 332:563-64 (1988); Morgan et al., Immunology 86:319-24 (1995)) or to reduce or abrogate the ability of the Fc polypeptide to bind to an IgG Fc receptor expressed by an immune cell (Wines et al., J. Immunol. 164:5313-18 (2000); Chappel et al., Proc. Natl. Acad. Sci. USA 88:9036 (1991); Canfield et al., J. Exp. Med. 173:1483 (1991); Duncan et al., supra); or to alter antibody-dependent cellular cytotoxicity. Such an Fc polypeptide variant that differs from the wildtype Fc polypeptide is also called herein a mutein Fc polypeptide.

[0125] In one embodiment, a 130L polypeptide (or fragment or variant thereof) is fused with an Fc polypeptide that comprises at least one substitution of a residue that in the wildtype Fc region polypeptide contributes to binding of an Fc polypeptide or immunoglobulin to one or more IgG Fc receptors expressed on certain immune cells. Such a mutein Fc polypeptide comprises at least one substitution of an amino acid residue in the CH2 domain of the mutein Fc polypeptide, such that the capability of the fusion polypeptide to bind to an IgG Fc receptor, such as an IgG Fc receptor present on the surface of an immune cell, is reduced.

[0126] As discussed herein, residues in the amino terminal portion of the CH2 domain that contribute to IgG Fc receptor binding include residues at positions Leu234-Ser239 (Leu-Leu-Gly-Gly-Pro-Ser (SEQ ID NO:152) (EU numbering system, Kabat et al., supra) (see, e.g., Morgan et al., Immunology 86:319-24 (1995), and references cited therein). Substitution of the amino acid at one or more of these six positions (i.e., one, two, three, four, five, or all six) in the CH2 domain results in a reduction of the capability of the Fc polypeptide to bind to one or more of the IgG Fc receptors (or isoforms thereof) (see, e.g., Burton et al., Adv. Immunol. 51:1 (1992); Hulett et al., Adv. Immunol. 57:1 (1994); Jefferis et al., Immunol. Rev. 163:59 (1998); Lund et al., J. Immunol. 147:2657 (1991); Sarmay et al., Mol. Immunol. 29:633 (1992); Lund et al., Mol. Immunol. 29:53 (1992); Morgan et al., supra). In addition to substitution of one or more amino acids at EU positions 234-239, one, two, or three or more amino acids adjacent to this region (either to the carboxy terminal side of position 239 or to the amino terminal side of position 234) may also be substituted.

[0127] By way of example, substitution of the leucine residue at position 235 with a glutamic acid residue or an alanine residue abolishes or reduces, respectively, the affinity of an immunoglobulin (such as human IgG3) for FcγRI (Lund et al., 1991, supra; Canfield et al., supra; Morgan et al., supra). As another example, replacement of the leucine residues at positions 234 and 235, for example, with alanine residues, abrogates binding of an immunoglobulin to FcγRIIa (see, e.g., Wines et al., supra). Alternatively, leucine at position 234, leucine at position 235, and glycine at position 237, each may be substituted with a different amino acid, such as leucine at position 234 may be substituted with an alanine residue (L234A), leucine at 235 may be substituted with an alanine residue (L235A) or with a glutamic acid residue (L235E), and the glycine residue at position 237 may be substituted with another amino acid, for example an alanine residue (G237A).

[0128] In one embodiment, a mutein Fc polypeptide that is fused in frame to a 130L polypeptide (or variant or fragment thereof) comprises one, two, three, four, five, or six mutations located between positions 15-20 of SEQ ID NO:145 or between positions 13-18 of SEQ ID NO:146 (substitutions at positions corresponding to EU 234, 235, and 237) that correspond to positions 234-239 of a human IgG1 CH2 domain (EU numbering system) as described herein.

[0129] In another embodiment, a mutein Fc polypeptide comprises a mutation of a cysteine residue in the hinge region of an Fc polypeptide. In one embodiment, the cysteine residue most proximal to the amino terminus of the hinge region of an Fc polypeptide (e.g., for example, the cysteine residue most proximal to the amino terminus of the hinge region of the Fc portion of a wildtype IgG1 immunoglobulin) is deleted or substituted with another amino acid. That is, by way of illustration, the cysteine residue at position 1 of SEQ ID NO:145 is deleted, or the cysteine residue at position 1 is substituted with another amino acid that is incapable of forming a disulfide bond, for example, with a serine residue. In another embodiment, a mutein Fc polypeptide comprises a deletion or substitution of the cysteine residue most proximal to the amino terminus of the hinge region of an Fc polypeptide further comprises deletion or substitution of the adjacent C-terminal amino acid. In a certain embodiment, this cysteine residue and the adjacent C-terminal residue are both deleted from the hinge region of a mutein Fc polypeptide. In a specific embodiment, the cysteine residue at position 1 of SEQ ID NO:145 and the aspartic acid at position 2 of SEQ ID NO:145 are deleted. Fc polypeptides that comprise deletion of the most amino terminal cysteine residue in the hinge region are more efficiently expressed in a host cell that comprises a recombinant expression construct encoding such a Fc polypeptide.

[0130] In a specific embodiment, a mutein Fc polypeptide comprises the amino acid sequence set forth in SEQ ID NO:146, which differs from the wildtype Fc polypeptide (SEQ ID NO:145) wherein the cysteine residue most proximal to the amino terminus of the hinge region of an Fc polypeptide is deleted and the C-terminal adjacent aspartic acid is deleted and the leucine reside that corresponds to EU234 is substituted with an alanine residue, the leucine residue that corresponds to EU235 is substituted with a glutamic acid residue, and the glycine that corresponds to EU237 is substituted with an alanine residue (see SEQ ID NO:146). Thus, an exemplary mutein Fc polypeptide has an amino acid sequence at its amino terminal end of KTHTCPPCPAPEAEGAPS (SEQ ID NO:148) (positions 1-18 of SEQ ID NO:146).

[0131] Other Fc variants encompass similar amino acid sequences of known Fc polypeptide sequences that have only minor changes, for example by way of illustration and not limitation, covalent chemical modifications, insertions, deletions and/or substitutions, which may further include conservative substitutions. Amino acid sequences that are similar to one another may share substantial regions of sequence homology. Similarly, nucleotide sequences that encode the Fc variants may encompass substantially similar nucleotide sequences and have only minor changes, for example by way of illustration and not limitation, covalent chemical modifications, insertions, deletions, and/or substitutions, which may further include silent mutations owing to degeneracy of the genetic code. Nucleotide sequences that are similar to one another may share substantial regions of sequence homology.

[0132] An Fc polypeptide or at least one immunogloblulin constant region, or portion thereof, when fused to a peptide or polypeptide of interest acts, at least in part, as a vehicle or carrier moiety that prevents degradation and/or increases half-life, reduces toxicity, reduces immunogenicity, and/or increases biological activity of the peptide such as by forming dimers or other multimers (see, e.g., U.S. Pat. Nos. 6,018,026; 6,291,646; 6,323,323; 6,300,099; 5,843,725). (See also, e.g., U.S. Pat. No. 5,428,130; U.S. Pat. No. 6,660,843; U.S. Patent Application Publication Nos. 2003/064480; 2001/053539; 2004/087778; 2004/077022; 2004/071712; 2004/057953/2004/053845/2004/044188; 2004/001853; 2004/082039).

[0133] A 130L polypeptide (or variant or fragment thereof) fused in frame with an Fc polypeptide or Fc polypeptide variant (e.g., a mutein Fc polypeptide) may comprise a peptide linker between the 130L polypeptide and Fc polypeptide. The linker may be a single amino acid (such as for example a glycine residue) or may be two, three, four, five, six, seven, eight, nine, or ten amino acids, or may be any number of amino acids between 10 and 20 amino acids. By way of illustration but not limitation, a linker may comprise at least two amino acids that are encoded by a nucleotide sequence that is a restriction enzyme recognition site. Examples of such restriction enzyme recognition sites include, for example, BamHI, ClaI, EcoRI, HindIII, KpnI, NcoI, NheI, PmlI, PstI, SalI, and XhoI.

[0134] A 130L polypeptide, fragment thereof, or variant thereof, fused in frame with a mutein Fc polypeptide may be used to suppress an immune response in a subject when administered with a pharmaceutically or physiologically suitable carrier or excipient according to methods described herein and known to practitioners in the medical art. Such fusion polypeptides may alter a biological activity of at least one of the RPTP polypeptides described herein (i.e., LAR, RPTP-σ, RPTP-δ), at least two of the RPTP polypeptides or all three RPTP polypeptides. In certain embodiments, a 130L polypeptide, fragment thereof, or variant thereof, fused in frame with a mutein Fc polypeptide is used for treating an immunological disease e or disorder (including an autoimmune disease or an inflammatory disease), which are described in detail herein. As described herein, the 130L/mutein Fc polypeptides may also be used to treat a disease or disorder associated with alteration of cell migration, cell proliferation, or cell differentiation, which includes but is not limited to an immunological disease or disorder, a cardiovascular disease or disorder, a metabolic disease or disorder, or a proliferative disease or disorder.

[0135] 130L polypeptide fragments include 130L polypeptide variant fragments. 130L polypeptide fragments also include 130L fragments having an amino acid sequence that differs from the full-length 130L from which the fragments were derived, that is the 130L polypeptide fragment variant has at least 99%, 98%, 97%, 95%, 90%, 87%, 85%, or 80% amino acid sequence identity with a portion of the full-length 130L polypeptide. Variants of 130L polypeptide fragments that have the capability to alter (suppress or enhance) the immunoresponsiveness of an immune cell retain comparable capability to alter the immunoresponsiveness of an immune cell.

[0136] 130L polypeptide variants and 130L polypeptide fragment variants that retain the capability to alter immunoresponsiveness of an immune cell include variants that contain conservative amino acid substitutions. A variety of criteria known to persons skilled in the art indicate whether amino acids at a particular position in a peptide or polypeptide are conservative (or similar). For example, a similar amino acid or a conservative amino acid substitution is one in which an amino acid residue is replaced with an amino acid residue having a similar side chain, such as amino acids with basic side chains (e.g., lysine, arginine, histidine); acidic side chains (e.g., aspartic acid, glutamic acid); uncharged polar side chains (e.g., glycine, asparagine, glutamine, serine, threonine, tyrosine, cysteine, histidine); nonpolar side chains (e.g., alanine, valine, leucine, isoleucine, proline, phenylalanine, methionine, tryptophan); beta-branched side chains (e.g., threonine, valine, isoleucine), and aromatic side chains (e.g., tyrosine, phenylalanine, tryptophan). Proline, which is considered more difficult to classify, shares properties with amino acids that have aliphatic side chains (e.g., leucine, valine, isoleucine, and alanine). In certain circumstances, substitution of glutamine for glutamic acid or asparagine for aspartic acid may be considered a similar substitution in that glutamine and asparagine are amide derivatives of glutamic acid and aspartic acid, respectively. As understood in the art “similarity” between two polypeptides is determined by comparing the amino acid sequence and conserved amino acid substitutes thereto of the polypeptide to the sequence of a second polypeptide (e.g., using GENEWORKS, Align, or the BLAST algorithm, as described herein).

[0137] A 130L polypeptide variant also includes a variant that interacts with or binds to only one or two (i.e., LAR and RPTP-δ, LAR and RPTP-σ, or RPTP-δ and RPTP-σ) but not all three of LAR, RPTP-δ, and RPTP-σ. Such a variant comprises at least 1, 2, 3,4, 5, 6, 7, 8, 9, 10, 11-15, 16-25, 26-35, or 36-45 amino acid substitutions, deletions, or insertions compared with the wildtype 130L polypeptide. Binding of 130L to each of the RPTPs may be determined according to methods described herein and practiced in the art. The source of the polypeptides for binding studies includes, for example, isolated 130L and RPTPs, or fragments thereof, or individual cell lines capable of recombinant expression of one of 130L, LAR, RPTP-δ, and RPTP-σ.

[0138] Variants of 130L full-length polypeptides or 130L fragments may be readily prepared by genetic engineering and recombinant molecular biology methods and techniques. Analysis of the primary and secondary amino acid sequence of a 130L polypeptide and computer modeling to analyze the tertiary structure of the polypeptide may aid in identifying specific amino acid residues that can be substituted without altering the structure and as a consequence, potentially the function, of the 130L polypeptide. Modification of DNA encoding a 130L polypeptide or fragment may be performed by a variety of methods, including site-specific or site-directed mutagenesis of the DNA, which methods include DNA amplification using primers to introduce and amplify alterations in the DNA template, such as PCR splicing by overlap extension (SOE). Mutations may be introduced at a particular location by synthesizing oligonucleotides containing a mutant sequence, flanked by restriction sites enabling ligation to fragments of the native sequence. Following ligation, the resulting reconstructed sequence encodes a variant (or derivative) having the desired amino acid insertion, substitution, or deletion.

[0139] Site-directed mutagenesis is typically effected using a phage vector that has single- and double-stranded forms, such as an M13 phage vector, which is well-known and commercially available. Other suitable vectors that contain a single-stranded phage origin of replication may be used (see, e.g., Veira et al., Meth. Enzymol. 15:3 (1987)). In general, site-directed mutagenesis is performed by preparing a single-stranded vector that encodes the protein of interest. An oligonucleotide primer that contains the desired mutation within a region of homology to the DNA in the single-stranded vector is annealed to the vector followed by addition of a DNA polymerase, such as E. coli DNA polymerase I (Klenow fragment), which uses the double stranded region as a primer to produce a heteroduplex in which one strand encodes the altered sequence and the other the original sequence. Additional disclosure relating to site-directed mutagenesis may be found, for example, in Kunkel et al. (Meth. Enzymol. 154:367 (1987)) and in U.S. Pat. Nos. 4,518,584 and 4,737,462. The heteroduplex is introduced into appropriate bacterial cells, and clones that include the desired mutation are selected. The resulting altered DNA molecules may be expressed recombinantly in appropriate host cells to produce the variant, modified protein.

[0140] Oligonucleotide-directed site-specific (or segment specific) mutagenesis procedures may be employed to provide an altered polynucleotide that has particular codons altered according to the substitution, deletion, or insertion desired. Deletion or truncation derivatives of proteins may also be constructed by using convenient restriction endonuclease sites adjacent to the desired deletion. Subsequent to restriction, overhangs may be filled in and the DNA religated. Exemplary methods of making the alterations set forth above are disclosed by Sambrook et al. (Molecular Cloning: A Laboratory Manual, 3d ed., Cold Spring Harbor Laboratory Press, N.Y. 2001). Alternatively, random mutagenesis techniques, such as alanine scanning mutagenesis, error prone polymerase chain reaction mutagenesis, and oligonucleotide-directed mutagenesis may be used to prepare 130L polypeptide variants and fragment variants (see, e.g., Sambrook et al., supra).

[0141] Assays for assessing whether the variant folds into a conformation comparable to the non-variant polypeptide or fragment include, for example, the ability of the protein to react with mono- or polyclonal antibodies that are specific for native or unfolded epitopes, the retention of ligand-binding functions, and the sensitivity or resistance of the mutant protein to digestion with proteases (see Sambrook et al., supra). 130L variants as described herein can be identified, characterized, and/or made according to these methods described herein or other methods known in the art, which are routinely practiced by persons skilled in the art.

[0142] Mutations that are made or identified in the nucleic acid molecules encoding a 130L polypeptide preferably preserve the reading frame of the coding sequences. Furthermore, the mutations will preferably not create complementary regions that when transcribed could hybridize to produce secondary mRNA structures, such as loops or hairpins, that would adversely affect translation of the mRNA. Although a mutation site may be predetermined, the nature of the mutation per se need not be predetermined. For example, to select for optimum characteristics of a mutation at a given site, random mutagenesis may be conducted at the target codon and the expressed mutants screened for gain or loss or retention of biological activity.

[0143] A 130L polynucleotide is any polynucleotide that encodes a 130L polypeptide or at least a portion (or fragment) of a 130L polypeptide or a variant thereof, or that is complementary to such a polynucleotide. The nucleotide sequences of polynucleotides that encode 130L, or its orthologues, may be found, for example, in the genomic sequences of yatapoxviruses provided in GenBank entries for which Accession numbers are provided herein, in GenBank Accession Nos. AJ293568 and NC_{—}002642 and that can be deduced from the amino acid sequences disclosed herein (e.g., SEQ ID NO:85 and SEQ ID NO:150). Polynucleotides comprise at least 15 consecutive nucleotides or at least 30, 35, 40, 50, 55, or 60 consecutive nucleotides, in certain embodiments at least 70, 75, 80, 90, 100, 110, 120, 125, or 130 consecutive nucleotides, and in other embodiments at least 135, 140, 145, 150, 155, 160, or 170 consecutive nucleotides, and in other embodiments at least 180, 190, 200, 225, 250, 275, 300, 325, 350, 375, 400, 405, 410, 420, 425, 445, 450, 475, 500, 525, 530, 545, 550, 575, 600, 625, 650, or 660 consecutive nucleotides that include sequences encoding a 130L polypeptide, or nucleotide sequences that are complementary to such a sequence. Certain polynucleotides that encode a 130L polypeptide, variant, or fragment thereof may also be used as probes, primers, short interfering RNA (siRNA), or antisense oligonucleotides, as described herein. Polynucleotides may be single-stranded DNA or RNA (coding or antisense) or double-stranded RNA (e.g., genomic or synthetic) or DNA (e.g., cDNA or synthetic).

[0144] Polynucleotide variants may also be identified by hybridization methods. Suitable moderately stringent conditions include, for example, pre-washing in a solution of 5×SSC, 0.5% SDS, 1.0 mM EDTA (pH 8.0); hybridizing at 50° C.-70° C., 5×SSC for 1-16 hours; followed by washing once or twice at 22-65° C. for 20-40 minutes with one or more each of 2×, 0.5×, and 0.2×SSC containing 0.05-0.1% SDS. For additional stringency, conditions may include a wash in 0.1×SSC and 0.1% SDS at 50-60° C. for 15 minutes. As understood by persons having ordinary skill in the art, variations in stringency of hybridization conditions may be achieved by altering the time, temperature, and/or concentration of the solutions used for pre-hybridization, hybridization, and wash steps. Suitable conditions may also depend in part on the particular nucleotide sequences of the probe used (i.e., for example, the guanine plus cytosine (G/C) versus adenine plus thymidine (A/T) content). Accordingly, a person skilled in the art will appreciate that suitably stringent conditions can be readily selected without undue experimentation when a desired selectivity of the probe is identified.

Receptor Protein Tyrosine Phosphatases (RPTP): LAR, RPTP-δ, and RPTP-σ

[0145] The leukocyte common-antigen-related protein (LAR), receptor-like protein tyrosine phosphatase-δ (RPTP-δ), and RPTP-σ are members of the receptor-like type II protein tyrosine phosphatases (PTPs). These RPTPs (also referred to herein as protein tyrosine phosphatases (PTP) or receptor protein tyrosine phosphatases) have three immunoglobulin-like (Ig-like) domains, a series of fibronectin type III-like motifs in the extracellular domain, a potential proteolytic processing site, a transmembrane element, and two tandem cytoplasmic phosphatase domains D1 and D2 (see, e.g., Alonso et al., Cell 117:699-711 (2004), see FIG. 2 therein; Streuli et al., J. Exp. Med. 168:1523 (1988); Charbonneau et al., Annu. Rev. Cell Biol. 8:463-93 (1992); Pan et al., J. Biol. Chem. 268:19284-91 (1993); Walton et al., Neuron 11:387-400 (1993); Yan et al., J. Biol. Chem. 268:24880-86 (1993); Zhang et al., Biochem. J. 302:39-47 (1994); Pulido et al., J. Biol. Chem. 270:6722-28 (1995)).

[0146] Several alternatively spliced variants of LAR have been identified, and are believed to be developmentally regulated (O'Grady et al., J. Biol. Chem. 269:25193 (1994); Zhang and Longo, J. Cell. Biol. 128:415 (1995); Honkaniemi et al., Mol. Brain. Res. 61:1 (1998)). Multiple isoforms of RPTP-δ and RPTP-σ as well as LAR appear to be generated by tissue-specific alternative splicing (see, e.g., Pulido et al., Proc. Natl. Acad. Sci. USA 92:11686-90 (1995)). In humans, the LAR gene maps to chromosome 1p32, a region that is frequently deleted in tumors of neuroectodermal origin (Jirik et al., Cytogenet. Cell Genet. 61:266 (1992)).

[0147] Protein tyrosine phosphatases such as LAR, RPTP-δ, and RPTP-σ dephosphorylate tyrosyl phosphoproteins that are components of cellular signal transduction pathways. Regulated phosphorylation and dephosphorylation of tyrosine residues of substrates is a major control mechanism for cellular processes such as cell growth, cell proliferation, metabolism, differentiation, and locomotion. Accordingly, the activities of protein tyrosine phosphatases and protein tyrosine kinases that regulate reversible tyrosine phosphorylation must be integrated and regulated in a cell. Abnormal regulation results in manifestation of several diseases and disorders. (See, e.g., Tonks and Neel, Curr. Opin. Cell Biol. 13:182-95 (2001)). Without wishing to be bound by theory, the biological specificity of receptor PTPs (RPTPs) may be derived from their cognate ligands. Certain diverse biological functions of LAR, RPTP-δ, and RPTP-σ have been suggested by the results of gene knockout animal studies. Disruption of expression of the LAR gene results in defective mammary gland development due to impaired terminal differentiation of alveoli during pregnancy (Schaapveid et al., Dev. Biol. 188:134-46 (1996)); some defects in forebrain size and hippocampal organization (Yeo et al., J. Neurosci. Res. 47:348-60 (1997)); and possibly, defects in glucose metabolism (Ren et al., Diabetes 47:493-97 (1998)). By contrast, deletion of RPTP-δ affects hippocampal long-term potentiation and learning (Ren et al., EMBO J. 19:2775-85 (2000)), and RPTP-σ deficient mice exhibit defects in brain development, including reduction in the size of the hypothalamus, olfactory bulb, and pituitary gland (Elchebly et al., Nat. Genet 21:330-33 (1999); Wallace et al., Nat. Genet 21:334-38 (1999)).

[0148] The results of various studies have suggested a number of biological roles for LAR: altering ability of cells to proliferate (see, e.g., Yang et al., Carcinogenesis 21:125; Tisi et al., J. Neurobiol. 42:477 (2000)); suppressing tumor cell growth (Zhai et al., Mol. Carcinogen. 14:103 (1995)); dephosphorylating the insulin receptor and affecting glucose homeostasis (Ahmad and Goldstein, J. Biol. Chem. 272:448 (1997); Ren et al., Diabetes 47:493 (1998)); regulating cell-matrix interactions (Pulido et al., supra); regulating synapse morphogenesis and function (see, e.g., Dunah et al., Nat. Neurosci. 8:458-67 (2005); and affecting immune cell function (U.S. Pat. No. 6,852,486). While studies have indicated that RPTP-δ and RPTP-σ may also affect cell adhesion (Pulido et al., supra) and synapse morphogenesis and function (see, e.g., Dunah et al., supra), none have suggested that these two phosphatases may also affect immune cell function. Accordingly, embodiments described herein relate to the unexpected discovery that all three phosphatases, LAR, RPTP-δ, and RPTP-σ are expressed by immune cells.

[0149] LAR, RPTP-δ, and RPTP-σ are cellular targets of the viral proteins A41L and 130L. Binding of these viral proteins to any one of these phosphatases can affect immune cell function. Particularly, A41L or 130L may suppress an immune response and act as a suppressor of the host immune system. Exemplary isoforms of LAR to which A41L and 130L may bind and alter the function include LAR comprising an amino acid sequence set forth in GenBank Accession Nos. NP_{—}002832 (SEQ ID NO:22) (encoded by a polynucleotide having the nucleotide sequence set forth in NM_{—}002840 (SEQ ID NO:23)); SEQ ID NO:24 (AAH48768) (encoded by a polynucleotide having the nucleotide sequence set forth in BC048768 (SEQ ID NO:65)); CAI14894 (SEQ ID NO:25); GenBank NP_{—}569707 (SEQ ID NO:26) (encoded by a polynucleotide having the nucleotide sequence set forth in NM_{—}130440 (SEQ ID NO:27)); and CAI14895 (SEQ ID NO:28). Exemplary isoforms of RPTP-σ to which A41L or 130L may bind and alter the function include RPTP-σ comprising an amino acid sequence set forth in GenBank NP_{—}002841 (SEQ ID NO:29) (encoded by a polynucleotide having the nucleotide sequence set forth in NM_{—}002850 (SEQ ID NO:30)); NP_{—}570924 (SEQ ID NO:31) (encoded by a polynucleotide having the nucleotide sequence set forth in NM_{—}130854 (SEQ ID NO:32)); GenBank NP_{—}570923 (SEQ ID NO:33) (encoded by a polynucleotide having the nucleotide sequence set forth in NM_{—}130853 (SEQ ID NO:34)); and NP_{—}570925 (SEQ ID NO:35) (encoded by a polynucleotide having the nucleotide sequence set forth in NM_{—}130855 (SEQ ID NO:36)); and Q13332 (SEQ ID NO:64)). Exemplary isoforms of RPTP-δ to which a viral protein may bind and alter the function include RPTP-δ comprising an amino acid sequence set forth in GenBank NP_{—}002830 (SEQ ID NO:37) (encoded by a polynucleotide having the nucleotide sequence set forth in NM_{—}002839 (SEQ ID NO:38)); NP_{—}569075 (SEQ ID NO:39) (encoded by a polynucleotide having the nucleotide sequence set forth in NM_{—}120391 (SEQ ID NO:40)); NP-569076 (SEQ ID NO:41) (encoded by a polynucleotide having the nucleotide sequence set forth in NM_{—}130392 (SEQ ID NO:42)); and NP_{—}569077 (SEQ ID NO:43) (encoded by a polynucleotide having the nucleotide sequence set forth in NM_{—}130393 (SEQ ID NO:44)).

[0150] The LAR, RPTP-δ, and RPTP-σ polypeptides described herein also include variants or each respective RPTP, and which have a similar amino acid sequence to the amino acid sequences disclosed herein. Variants include, for example, naturally occurring polymorphisms (e.g., such as allelic variants) or recombinantly manipulated or engineered RPTP polypeptide variants. An RPTP variant has at least 70%, 75%, 80%, 85%, 90%, 95%, or 98% identity or similarity to the wild-type RPTP. A variety of criteria known to persons skilled in the art indicate whether amino acids at a particular position in a peptide or polypeptide are conservative or similar. For example, a similar amino acid or a conservative amino acid substitution is one in which an amino acid residue is replaced with an amino acid residue having a similar side chain, such as amino acids with basic side chains (e.g. lysine, arginine, histidine); acidic side chains (e.g., aspartic acid, glutamic acid); uncharged polar side chains (e.g., glycine, asparagine, glutamine, serine, threonine, tyrosine, cysteine, histidine); nonpolar side chains (e.g., alanine, valine, leucine, isoleucine, proline, phenylalanine, methionine, tryptophan); beta-branched side chains (e.g., threonine, valine, isoleucine), and aromatic side chains (e.g., tyrosine, phenylalanine, tryptophan). Proline, which is considered more difficult to classify, shares properties with amino acids that have aliphatic side chains (e.g., leucine, valine, isoleucine, and alanine). In certain circumstances, substitution of glutamine for glutamic acid or asparagine for aspartic acid may be considered a similar substitution in that glutamine and asparagine are amide derivatives of glutamic acid and aspartic acid, respectively. The percent identity or similarity between two RPTPs having an amino acid sequence can be readily determined by alignment methods (e.g., using GENEWORKS, Align or the BLAST algorithm), which are also described herein and are familiar to a person having ordinary skill in the art.

[0151] An RPTP variant may also be readily prepared by genetic engineering and recombinant molecular biology methods and techniques as described herein regarding A41L polypeptide variants. Briefly, analysis of the primary and secondary amino acid sequence of an RPTP and computer modeling to analyze the tertiary structure of the polypeptide may aid in identifying specific amino acid residues that can be substituted. Modification of DNA encoding an RPTP polypeptide or fragment may be performed by a variety of methods, including site-specific or site-directed mutagenesis of the DNA, which methods include DNA amplification using primers to introduce and amplify alterations in the DNA template, such as PCR splicing by overlap extension (SOE). Mutations may be introduced at a particular location by synthesizing oligonucleotides containing a mutant sequence, flanked by restriction sites enabling ligation to fragments of the native sequence. Following ligation, the resulting reconstructed sequence encodes a variant (or derivative) having the desired amino acid insertion, substitution, or deletion.

[0152] As described herein site-directed mutagenesis is typically effected using a phage vector that has single- and double-stranded forms, such as an M13 phage vector, which is well known and commercially available (see, e.g., Veira et al., Meth. Enzymol. 15:3 (1987); Kunkel et al., Meth. Enzymol. 154:367 (1987)) and in U.S. Pat. Nos. 4,518,584 and 4,737,462). Oligonucleotide-directed site-specific (or segment specific) mutagenesis procedures may be employed to provide an altered polynucleotide that has particular codons altered according to the substitution, deletion, or insertion desired. Deletion or truncation derivatives of proteins may also be constructed by using convenient restriction endonuclease sites adjacent to the desired deletion. Exemplary methods of making the alterations set forth above are disclosed by Sambrook et al. (Molecular Cloning: A Laboratory Manual, 3d ed., Cold Spring Harbor Laboratory Press, N.Y. 2001). Alternatively, random mutagenesis techniques, such as alanine scanning mutagenesis, error prone polymerase chain reaction mutagenesis, and oligonucleotide-directed mutagenesis may be used to prepare RPTP polypeptide variants and fragment variants (see, e.g., Sambrook et al., supra). Assays for assessing whether the variant folds into a conformation comparable to the non-variant polypeptide or fragment include, for example, the ability of the protein to react with mono- or polyclonal antibodies that are specific for native or unfolded epitopes, the retention of ligand-binding functions, and the sensitivity or resistance of the mutant protein to digestion with proteases (see Sambrook et al., supra). RPTP variants as described herein can be identified, characterized, and/or made according to these methods described herein or other methods known in the art, which are routinely practiced by persons skilled in the art.

[0153] Mutations that are made or identified in the nucleic acid molecules encoding an RPTP polypeptide preferably preserve the reading frame of the coding sequences. Furthermore, the mutations will preferably not create complementary regions that when transcribed could hybridize to produce secondary mRNA structures, such as loops or hairpins, that would adversely affect translation of the mRNA. Although a mutation site may be predetermined, the nature of the mutation per se need not be predetermined. For example, to select for optimum characteristics of a mutation at a given site, random mutagenesis may be conducted at the target codon and the expressed mutants screened for gain or loss or retention of biological activity.

[0154] An RPTP variant retains at least one biological activity or function (e.g., phosphatase activity, mediate or initiate a signal transduction event associated with the wildtype RPTP, bind to at least one cognate ligand, and as further described in detail herein) of the wildtype RPTP. Preferably, the RPTP retains the capability to interact with its cognate ligand(s) and to dephosphorylate a tyrosine phosphorylated substrate.

[0155] Polynucleotide variants may also be identified by hybridization methods. Suitable moderately stringent conditions include, for example, pre-washing in a solution of 5×SSC, 0.5% SDS, 1.0 mM EDTA (pH 8.0); hybridizing at 50° C.-70° C., 5×SSC for 1-16 hours; followed by washing once or twice at 22-65° C. for 20-40 minutes with one or more each of 2×, 0.5, and 0.2×SSC containing 0.05-0.1% SDS. For additional stringency, conditions may include a wash in 0.1×SSC and 0.1% SDS at 50-60° C. for 15 minutes. As understood by persons having ordinary skill in the art, variations in stringency of hybridization conditions may be achieved by altering the time, temperature, and/or concentration of the solutions used for pre-hybridization, hybridization, and wash steps. Suitable conditions may also depend in part on the particular nucleotide sequences of the probe used (i.e., for example, the guanine plus cytosine (G/C) versus adenine plus thymidine (A/T) content). Accordingly, a person skilled in the art will appreciate that suitably stringent conditions can be readily selected without undue experimentation when a desired selectivity of the probe is identified.

[0156] Each of the RPTPs has a signal peptide sequence of approximately 20-30 amino acids at the amino terminal end (see, e.g., Pulido et al. supra) (see also, e.g., the GenBank database reports). Signal peptides are not exposed on the cell surface of a secreted or transmembrane protein because either the signal peptide is cleaved during translocation of the protein or the signal peptide remains anchored in the outer cell membrane (such a peptide is also called a signal anchor) (see, e.g., Nielsen et al., Protein Engineering 10:1-6 (1997); Nielsen et al., in J. Glasgow et al., eds., Proc. Sixth Int. Conf. on Intelligent Systems for Molecular Biology, 122-30 (AAAI Press 1998)). Accordingly, the signal peptide sequence of an RPTP would likely not be part of a binding site on the extracellular portion of the RPTP to which a ligand would bind, such as A41L or an antibody or antigen-binding fragment thereof that specifically binds to the extracellular portion of the RPTP.

[0157] As described herein, the extracellular portion of the RPTP that is exposed on the outer surface of a cell (such as an immune cell), which does not include the signal peptide (also referred to herein as the mature RPTP), comprises three immunoglobulin-like domain(s). The immunoglobulin domains (or immunoglobulin-like domains) are referred to herein as the first, second, and third immunoglobulin domains (alternatively, referred to as Ig-1, Ig-2, Ig-3 or as immunoglobulin-like domain 1, immunoglobulin-like domain 2, and immunoglobulin-like domain 3), wherein the first immunoglobulin domain is the domain that is most proximal to the N-terminus of the RPTP (see FIG. 1). The first immunoglobulin domain is immediately adjacent to the carboxy end of the signal peptide (see FIG. 1). Thus, as used herein, the first immunoglobulin-like domain of an RPTP is the immunoglobulin-like domain that is most proximal to the amino terminus of the RPTP; the second immunoglobulin-like domain of an RPTP is the immunoglobulin-like domain that is between the first and third immunoglobulin-like domains of an RPTP; and the third immunoglobulin-like domain of an RPTP is the immunoglobulin-like domain that is most proximal to the carboxy terminus of the RPTP.

[0158] A person skilled in the protein art will understand that the termini or boundaries of the domains do not necessarily correspond to exact amino acid positions in the primary sequence as shown, for example, in FIG. 1. Accordingly, for example, the immunoglobulin domains, fibronectin III repeats, and the catalytic domains may include one, two, three, four, five, six, seven, eight, or more amino acids at positions adjacent to the amino-terminal end and/or the carboxy terminal end of each domain. A person skilled in the art can readily determine what positions in an RPTP correspond to each of the Ig-like domains of the RPTP using the sequences and figures provided herein and the sequences known in the art (both amino acid and the encoding nucleotide sequence). For example, but not limiting, the Ig-1 domain of LAR corresponds to amino acid positions 31-125 of SEQ ID NO:25; the Ig-2 domain of LAR corresponds to amino acid positions 111-227; and the Ig-3 domain of LAR corresponds to amino acid positions 228-316. For RPTP-σ, the Ig-1 domain corresponds to amino acid positions 31-125; the Ig-2 domain corresponds to amino acid positions 127-240; and the Ig-3 domain corresponds to amino acid positions 241-329. For RPTP-δ, the Ig-1 domain corresponds to amino acid positions 22-116; the Ig-2 domain corresponds to amino acid positions 118-231; and the Ig-3 domain corresponds to amino acid positions 232-320. As discussed herein, the amino acids at each terminal end of the domains may vary depending upon the particular RPTP, or variant thereof (such as an allelic variant, cell type variant, or the like), a Ig domain variant includes an Ig domain of the LAR, RPTP-δ, or RPTP-σ that is 99%, 98%, 97%, 96%, 95%, or 90%, 85%, or 80% identical to the sequences for each immunoglobulin-like domain of each RPTP described herein.

[0159] In one embodiment, the extracellular portion of LAR, RPTP-δ, or RPTP-σ may be used to alter (enhance or suppress in a statistically or biologically significant manner) the immunoresponsiveness of an immune cell. In another embodiment, an extracellular portion of an RPTP (also referred to herein as soluble LAR, RPTP-δ, or RPTP-σ) that comprises at least one, two or all three of the immunoglobulin-like domains of LAR, RPTP-δ, or RPTP-σ and does not include any one or more of the fibronectin domains of the RPTP may be used to alter the immunoresponsiveness of an immune cell. For ease of reference, the latter polypeptides (i.e., an RPTP (LAR, RPTP-δ, or RPTP-σ) that comprises at least one, two or all three of the immunoglobulin-like domains, as a monomer or oligomers as described herein) are referred to herein as RPTP Ig-like domain polypeptides.

[0160] In certain embodiments, the immunoresponsiveness of an immune cell is enhanced. The extracellular portion or fragment of the RPTP, such as the at least one, two or all three immunoglobulin-like domain(s), can be administered to a host or subject such that at least one ligand that binds to the RPTP expressed on an immune cell binds to the exogenously added RPTP fragment. The ligand may be soluble or the ligand may be expressed on the cell surface of the same cell as the immune cell that expresses the RPTP, or the ligand may be a cell surface protein that is expressed by another cell. Thus, a soluble LAR, RPTP-δ, or RPTP-σ may interact with the ligand and reduce the amount of the ligand available to bind to the RPTP expressed on an immune cell, that is, the ligand is blocked from binding to the RPTP expressed on the cell, in turn inhibiting, preventing, diminishing, reducing, or abrogating, the function, activity (e.g., phosphatase activity), or signaling event associated with binding of the ligand to the RPTP.

[0161] In another embodiment, an extracellular portion (e.g., at least one, two or all three of the immunoglobulin-like domains) of any one of LAR, RPTP-δ, or RPTP-σ may suppress an immune response. A ligand, which may be either a soluble ligand or a ligand that is a cell surface protein, may interact with an RPTP on the cell surface of an immune cell, and this interaction may induce an inflammatory response or may induce the expression or production of a cytokine (e.g., but not limited to, cytokines described herein including IFN-γ) that induces or exacerbates an inflammatory or autoimmune response. The interaction of one or more of the LAR, RPTP-δ, and RPTP-σ expressed on an immune cell with such a ligand (soluble or a cell surface protein) may be inhibited, prevented, or blocked by soluble RPTP that first interacts with or binds to the ligand.

[0162] In a certain embodiment, at least one, or at least two, or all three of the immunoglobulin-like domains are linked (i.e., attached or fused) to a non-RPTP moiety. The moiety may be linked to the RPTP fragment by covalent or noncovalent attachment of the moiety to the fragment, for example, by using conjugation methods, which vary depending on the nature of the moiety (such as if the moiety is a carbohydrate or a polypeptide or small molecule), and with which persons skilled in the particular art are familiar. Alternatively, when the non-RPTP moiety is a peptide or polypeptide, the moiety may be linked recombinantly to form a RPTP fragment fusion polypeptide. For example, recombinant expression constructs may be prepared that comprise a polynucleotide encoding a fusion polypeptide comprising at least one, at least two, or all three immunoglobulin-like domains (or a portion thereof) of the RPTP fused with, for example, an at least one immunoglobulin (Ig) constant region domain or at least two Ig constant region domains of an immunoglobulin Fc polypeptide.

[0163] In one embodiment, the second and third immunoglobulin-like domains of LAR, of RPTP-δ, or of RPTP-σ are fused to an immunoglobulin Fc polypeptide; and in still another embodiment, the first, second, and third immunoglobulin like domains of LAR, or of RPTP-δ, or of RPTP-δ are fused to an immunoglobulin Fc polypeptide. In certain embodiments, the first immunoglobulin-like domain of LAR, RPTP-δ, or RPTP-σ is fused to an immunoglobulin Fc polypeptide. In another embodiment, the second immunoglobulin like domain of LAR, RPTP-δ, or RPTP-σ is fused to an immunoglobulin Fc polypeptide; in still another embodiment, the third immunoglobulin like domain of LAR, RPTP-δ, or RPTP-σ is fused to an immunoglobulin Fc polypeptide. In other embodiments, the first and second immunoglobulin like domains of LAR, of RPTP-δ, or of RPTP-σ are fused to an immunoglobulin Fc polypeptide; in yet other embodiments, the first and third immunoglobulin like domains of LAR, of RPTP-δ, or of RPTP-σ are fused to an immunoglobulin Fc polypeptide. In certain instances, use of the first immunoglobulin-like domain alone (i.e., in the absence of the second and/or third immunoglobulin-like domains) or a polypeptide having the first immunoglobulin-like domain and the second immunoglobulin-like domain (i.e., in the absence of the third Ig-like domain) fused to an Fc polypeptide may be less effective to suppress an immune response in an immune cell or in a host in a manner similar to A41L. Without wishing to be bound by any particular theory, and as described herein, because A41L does not bind to the first immunoglobulin-like domain alone in the absence of the second and third Ig-like domains, a RPTP Ig-like domain that incorporates only the first domain may be less effective to interact with a ligand or cell surface polypeptide to effect suppression of an immune response in the same manner as A41L.

[0164] In still other embodiments, a soluble RPTP (i.e., a RPTP Ig-like domain polypeptide) may comprise one, two, or three immunoglobulin-like domains in the various combinations described above that is not attached or fused to a non-RPTP moiety. For example, a RPTP Ig-like domain polypeptide may comprise the first, second, and third Ig-like domains of an RPTP (LAR, RPTP-δ, or RPTP-σ; the second and third Ig-like domains of an RPTP. In certain alternative embodiments, a RPTP Ig-like domain polypeptide may comprise the first and second or first and third Ig-like domains of an RPTP; or each Ig-like domain alone.

[0165] Soluble RPTP Ig-like domain polypeptides may also exist as multimers, such as dimers and trimers. The multimers may form by noncovalent interactions under conditions that favor such interactions (which include physiological conditions) or may form by a combination of covalent and non-covalent interactions. Alternatively, multimers may be formed by chemically or recombinantly linking at least two monomeric RPTP Ig-like domain polypeptides. The multimers may comprise, for example, homodimers or heterodimers. For instance, a homodimer may comprise (1) a first monomer of at least one, two, or three immunoglobulin-like domains of an RPTP and (2) a second monomer of the same at least one, two, or three immunoglobulin-like domains of the same RPTP. In certain specific embodiments, for example, a homodimer may comprise a first and second monomer that each comprises the second and third (or, alternatively, the first, second, and third) immunoglobulin-like domains of LAR. In another embodiment, each monomer (e.g., the second and third immunoglobulin-like domains or the first, second, and third immunoglobulin-like domains) of a homodimer is derived from RPTP-δ, and in another embodiment, each monomer is derived from RPTP-σ.

[0166] Alternatively, the oligomers, such as dimers, may be heterodimers, and each monomer is derived from a different RPTP (i.e., LAR, RPTP-δ, or RPTP-σ). In a certain embodiment, a heterodimer may comprise a first monomer, which includes the second and third (or, alternatively, the first, second, and third) immunoglobulin-like domains of LAR and a second monomer, which includes the second and third (or, alternatively, the first, second, and third) immunoglobulin-like domains, of either RPTP-δ or RPTP-σ. In another embodiment, a first monomer of a heterodimer comprises the second and third (or, alternatively, the first, second, and third) immunoglobulin-like domains of RPTP-δ, and the second monomer of the heterodimer includes the corresponding immunoglobulin-like domains of RPTP-94 .

[0167] In certain other embodiments, homodimers or heterodimers comprise a first and second monomer and each monomer comprises only one immunoglobulin-like domain from an RPTP. In still other embodiments, each monomer of a homodimer or a heterodimer comprises the first and third immunoglobulin-like domains of an RPTP; and in certain other embodiments, each monomer comprises the first and second immunoglobulin-like domains of an RPTP. Thus a homodimer may comprise two monomers, each composed of the first and second immunoglobulin-like domains of LAR, or each monomer may be composed of the first and third immunoglobulin-like domains of LAR. Homodimers may be similarly constructed for each of RPTP-δ and RPTP-σ. Heterodimers may be prepared from a first and second monomer, which are different, for example, a first monomer may comprise the first and second immunoglobulin-like domains or first and third immunoglobulin like domains of LAR and the second monomer may comprise the first and second immunoglobulin-like domains or first and third immunoglobulin like domains, respectively of either RPTP-δ or RPTP-σ. In other embodiments, heterodimers may comprise a first monomer comprising the first and second immunoglobulin-like domains, or first and third immunoglobulin like domains, of RPTP-δ and the second monomer may comprise the first and second immunoglobulin-like domains, or first and third immunoglobulin like domains, respectively, of RPTP-σ.

[0168] In other embodiments, an immunoglobulin-like domain from one RPTP may be fused to an immunoglobulin domain from a different RPTP. For example, the first immunoglobulin like domain of RPTP-δ or RPTP-σ may be fused to the second and third immunoglobulin-like domains of LAR. A number of combinations of immunoglobulin-like domains from each of the three RPTPs described herein may be envisioned to provide a soluble RPTP molecule that comprises in total two or three immunoglobulin-like domains. As described above, the soluble RPTP Ig domain polypeptides may be prepared recombinantly using molecular biology techniques or may be noncovalently combined or covalently fused with or without one or more linking or spacer amino acids.

[0169] An Fc polypeptide of an immunoglobulin that may be fused to a RPTP Ig-like domain polypeptide, as discussed in detail above, comprises the heavy chain CH2 domain and CH3 domain and a portion of or the entire hinge region that is located between CH1 and CH2. Historically, the Fc fragment was derived by papain digestion of an immunoglobulin and included the hinge region of the immunoglobulin. Fc regions are monomeric polypeptides that may be linked into dimeric or multimeric forms by covalent (e.g., particularly disulfide bonds) and non-covalent association. The number of intermolecular disulfide bonds between monomeric subunits of Fc polypeptides varies depending on the immunoglobulin class (e.g., IgG, IgA, IgE) or subclass (e.g., human IgG1, IgG2, IgG3, IgG4, IgA1, IgA2).

[0170] Fragments of an Fc polypeptide, such as an Fc polypeptide that is truncated at the C-terminal end (that is at least 1, 2, 3, 4, 5, 10, 15, 20, or more amino acids have been removed or deleted), also may be employed. In certain embodiments, the Fc polypeptides described herein contain multiple cysteine residues, such as at least some or all of the cysteine residues in the hinge region, to permit interchain disulfide bonds to form between the Fc polypeptide portions of two separate RPTP domain(s)/Fc fusion proteins, thus forming RPTP domain(s)/Fc fusion polypeptide dimers. In other embodiments, if retention of antibody dependent cell-mediated cytotoxicity (ADCC) and complement fixation (and associated complement associated cytotoxicity (CDC)) is desired, the Fc polypeptide comprises substitutions or deletions of cysteine residues in the hinge region such that an Fc polypeptide fusion protein is monomeric and fails to form a dimer (see, e.g., U.S. Patent Application Publication No. 2005/0175614).

[0171] The Fc portion of the immunoglobulin mediates certain effector functions of an immunoglobulin. Three general categories of effector functions associated with the Fc region include (1) activation of the classical complement cascade, (2) interaction with effector cells, and (3) compartmentalization of immunoglobulins. Presently, an Fc polypeptide, and any one or more constant region domains, and fusion proteins comprising at least one immunoglobulin constant region domain can be readily prepared according to recombinant molecular biology techniques with which a skilled artisan is quite familiar.

[0172] An Fc polypeptide is preferably prepared using the nucleotide sequence and the encoded amino acid sequence derived from the animal species for whose use the peptide-IgFc fusion polypeptide is intended. In one embodiment, the Fc polypeptide is of human origin and may be from any of the immunoglobulin classes, such as human IgG1 and IgG2.

[0173] An Fc polypeptide as described herein also includes Fc polypeptide variants. One such Fc polypeptide variant has one or more cysteine residues (such as one or more cysteine residues in the hinge region) that forms a disulfide bond with another Fc polypeptide substituted with another amino acid, such as serine, to reduce the number of disulfide bonds formed between two Fc polypeptides. Alternatively, one or more cysteine residues may be deleted from the wildtype hinge of the Fc polypeptide.

[0174] Another example of an Fc polypeptide variant is a variant that has one or more amino acids involved in an effector function substituted or deleted such that the Fc polypeptide has a reduced level of an effector function. For example, amino acids in the Fc region may be substituted to reduce or abrogate binding of a component of the complement cascade (see, e.g., Duncan et al., Nature 332:563-64 (1988); Morgan et al., Immunology 86:319-24 (1995)) or to reduce or abrogate the ability of the Fc polypeptide to bind to an IgG Fc receptor expressed by an immune cell (Wines et al., J. Immunol. 164:5313-18 (2000); Chappel et al., Proc. Natl. Acad. Sci. USA 88:9036 (1991); Canfield et al., J. Exp. Med. 173:1483 (1991); Duncan et al., supra); or to alter antibody-dependent cellular cytotoxicity. Such an Fc polypeptide variant that differs from the wildtype Fc polypeptide is also called herein a mutein Fc polypeptide.

[0175] In one embodiment, at least one immunoglobulin like domain of an RPTP (LAR, RPTP-δ, RPTP-σ, or variant thereof) is fused in frame with an Fc polypeptide that comprises at least one substitution of a residue that in the wildtype Fc region polypeptide contributes to binding of an Fc polypeptide or immunoglobulin to one or more IgG Fc receptors expressed on certain immune cells. Such a mutein Fc polypeptide comprises at least one substitution of an amino acid residue in the CH2 domain of the mutein Fc polypeptide, such that the capability of the fusion polypeptide to bind to an IgG Fc receptor, such as an IgG Fc receptor present on the surface of an immune cell, is reduced. The types of Fc IgG receptors expressed on human leukocytes are described in detail above.

[0176] As described in detail herein, residues of the amino terminal portion of the CH2 domain that contribute to IgG Fc receptor binding include residues at positions Leu234-Ser239 (Leu-Leu-Gly-Gly-Pro-Ser (SEQ ID NO:80) (EU numbering system, Kabat et al., supra) (see, e.g., Morgan et al., Immunology 86:319-24 (1995), and references cited therein). These positions correspond to positions 15-20 of the amino acid sequence of a human IgG1 Fc polypeptide (SEQ ID NO:79). Substitution of the amino acid at one or more of these six positions (i.e., one, two, three, four, five, or all six) in the CH2 domain results in a reduction of the capability of the Fc polypeptide to bind to one or more of the IgG Fc receptors (or isoforms thereof) (see, e.g., Burton et al., Adv. Immunol. 51:1 (1992); Hulett et al., Adv. Immunol. 57:1 (1994); Jefferis et al., Immunol. Rev. 163:59 (1998); Lund et al., J. Immunol. 147:2657 (1991); Sarmay et al., Mol. Immunol. 29:633 (1992); Lund et al., Mol. Immunol. 29:53 (1992); Morgan et al., supra). In addition to substitution of one or more amino acids at EU positions 234-239, one, two, or three or more amino acids adjacent to this region (either to the carboxy terminal side of position 239 or to the amino terminal side of position 234) may also be substituted.

[0177] By way of example, substitution of the leucine residue at position 235 (which corresponds to position 16 of SEQ ID NO:79) with a glutamic acid residue or an alanine residue abolishes or reduces, respectively, the affinity of an immunoglobulin (such as human IgG3) for FcγRI (Lund et al., 1991, supra; Canfield et al., supra; Morgan et al., supra). As another example, replacement of the leucine residues at positions 234 and 235 (which correspond to positions 15 and 16 of SEQ ID NO:79), for example, with alanine residues, abrogates binding of an immunoglobulin to FcγRIIa (see, e.g., Wines et al., supra). Alternatively, leucine at position 234 (which corresponds to position 15 of SEQ ID NO:79), leucine at position 235 (which corresponds to position 16 of SEQ ID NO:79), and glycine at position 237 (which corresponds to position 18 of SEQ ID NO:79), each may be substituted with a different amino acid, such as leucine at position 234 may be substituted with an alanine residue (L234A), leucine at 235 may be substituted with an alanine residue (L235A) or with a glutamic acid residue (L235E), and the glycine residue at position 237 may be substituted with another amino acid, for example an alanine residue (G237A).

[0178] In one embodiment, a mutein Fc polypeptide that is fused in frame to a viral polypeptide (or variant or fragment thereof) comprises one, two, three, four, five, or six mutations at positions 15-20 of SEQ ID NO:79 that correspond to positions 234-239 of a human IgG1 CH2 domain (EU numbering system) as described herein. An exemplary mutein Fc polypeptide has the amino acid sequence set forth in SEQ ID NO:77 in which substitutions corresponding to (L234A), (L235E), and (G237A) may be found at positions 13, 14, and 16 of SEQ ID NO:77.

[0179] In another embodiment, a mutein Fc polypeptide comprises a mutation of a cysteine residue in the hinge region of an Fc polypeptide. In one embodiment, the cysteine residue most proximal to the amino terminus of the hinge region of an Fc polypeptide (e.g., for example, the cysteine residue most proximal to the amino terminus of the hinge region of the Fc portion of a wildtype IgG1 immunoglobulin) is deleted or substituted with another amino acid. That is, by way of illustration, the cysteine residue at position 1 of SEQ ID NO:79 is deleted, or the cysteine residue at position 1 is substituted with another amino acid that is incapable of forming a disulfide bond, for example, with a serine residue. In another embodiment, a mutein Fc polypeptide comprises a deletion or substitution of the cysteine residue most proximal to the amino terminus of the hinge region of an Fc polypeptide further comprises deletion or substitution of the adjacent C-terminal amino acid. In a certain embodiment, this cysteine residue and the adjacent C-terminal residue are both deleted from the hinge region of a mutein Fc polypeptide. In a specific embodiment, the cysteine residue at position 1 of SEQ ID NO:79 and the aspartic acid at position 2 of SEQ ID NO:79 are deleted. Fc polypeptides that comprise deletion of these cysteine and aspartic acid residues in the hinge region may be efficiently expressed in a host cell, and in certain instances, may be more efficiently expressed in a cell than an Fc polypeptide that retains the wildtype cysteine and aspartate residues.

[0180] In a specific embodiment, a mutein Fc polypeptide comprises the amino acid sequence set forth in SEQ ID NO:77, which differs from the wildtype Fc polypeptide (SEQ ID NO:79) wherein the cysteine residue at position 1 of SEQ ID NO:79 is deleted and the aspartic acid at position 2 of SEQ ID NO:79 is deleted and the leucine reside at position 15, corresponding to position EU234, of SEQ ID NO:79 is substituted with an alanine residue, the leucine residue at position 16 (which corresponds to EU235) is substituted with a glutamic acid residue, and the glycine at position 18, corresponding to EU237, is substituted with an alanine residue (see also FIG. 5). Thus, an exemplary mutein Fc polypeptide comprises an amino acid sequence at its amino terminal portion of KTHTCPPCPAPEAEGAPS (SEQ ID NO:81) (see SEQ ID NO:77, an exemplary Fc mutein sequence).

[0181] Other Fc variants encompass similar amino acid sequences of known Fc polypeptide sequences that have only minor changes, for example by way of illustration and not limitation, covalent chemical modifications, insertions, deletions and/or substitutions, which may further include conservative substitutions. Amino acid sequences that are similar to one another may share substantial regions of sequence homology. Similarly, nucleotide sequences that encode the Fc variants may encompass substantially similar nucleotide sequences and have only minor changes, for example by way of illustration and not limitation, covalent chemical modifications, insertions, deletions, and/or substitutions, which may further include silent mutations owing to degeneracy of the genetic code. Nucleotide sequences that are similar to one another may share substantial regions of sequence homology.

[0182] An Fc polypeptide or at least one immunogloblulin constant region, or portion thereof, when fused to a peptide or polypeptide of interest acts, at least in part, as a vehicle or carrier moiety that prevents degradation and/or increases half-life, reduces toxicity, reduces immunogenicity, and/or increases biological activity of the peptide such as by forming dimers or other multimers (see, e.g., U.S. Pat. Nos. 6,018,026; 6,291,646; 6,323,323; 6,300,099; 5,843,725). (See also, e.g., U.S. Pat. No. 5,428,130; U.S. Pat. No. 6,660,843; U.S. Patent Application Publication Nos. 2003/064480; 2001/053539; 2004/087778; 2004/077022; 2004/071712; 2004/057953/ 2004/053845/ 2004/044188; 2004/001853; 2004/082039). Alternative moieties to an immunoglobulin constant region such as an Fc polypeptide that may be linked or fused to a peptide that alters the immunoresponsiveness of an immune cell include, for example, a linear polymer (e.g., polyethylene glycol, polylysine, dextran, etc.; see, for example, U.S. Pat. No. 4,289,872; International Patent Application Publication No. WO 93/21259); a lipid; a cholesterol group (such as a steroid); a carbohydrate or oligosaccharide.

[0183] The nucleotide sequences that encode Fc polypeptides from various classes and isotypes of immunoglobulins from various species are known and available in GenBank databases and in Kabat (Kabat et al., in Sequences of Proteins of Immunological Interest, 4th ed., (U.S. Dept. of Health and Human Services, U.S. Government Printing Office, 1991), see also updates to the online Kabat database), any sequence of which may be used for preparing a recombinant construct according to molecular biology methods routinely practiced by persons skilled in the art. To minimize the immunogenicity of the Fc polypeptide in the host or subject to which a RPTP fragment fusion polypeptide may be administered, the sequence of the Fc polypeptide is typically chosen from immunoglobulins of the same species, that is, for example, a human Fc polypeptide sequence is fused to a RPTP fragment that will be administered to a human subject or host.

[0184] Methods that are described herein for identifying cell surface molecules such as the RPTPS that interact with and/or bind to poxvirus polypeptides such as A41L or 130L, may also be used to identify intracellular molecules that interact with, are ligands for, form a complex with, or are otherwise associated with the RPTPs described herein (i.e., LAR, RPTP-δ, and/or RPTP-σ). Without wishing to be bound by theory, identification of intracellular molecules that interact with one or more of LAR, RPTP-δ, and RPTP-σ by virtue of the interaction between a poxvirus polypeptide and the RPTP may identify particular pathways (and components thereof) involved in, or that when disrupted or activated result in, manifestation of a disease or disorder. Such intracellular molecules (for example, plakoglobulin and liprin-1-δ that interact with at least LAR identified by TAP-TAG procedures using A41L) that associate with one or more of the RPTPs and that are involved with one or more signal transduction pathways may be targets for agents and compositions that are useful for treating an immunological disease or disorder, cardiovascular disease or disorder, or metabolic disease or disorder as described herein. Alternatively, agents described herein that interact with one or more of LAR, RPTP-δ, and RPTP-σ and that are useful for treating a disease or disorder and/or altering immunoresponsiveness of an immune cell may affect the interaction between the RPTP and the intracellular molecule, and thus may alter one or more biological activities of the cell.

Agents

[0185] Binding of a poxvirus polypeptide, such as A41L or 130L, to LAR, RPTP-δ, and/or RPTP-σ alters at least one biological function of these phosphatases, and as described herein the interaction between A41L or 130L with LAR, RPTP-δ, and/or RPTP-σ expressed on the cell surface of an immune cell may alter (e.g., suppresses or enhances) the immunoresponsiveness of the cell. Alteration of the immunoresponsiveness of an immune cell may also be effected by a bioactive agent (compound or molecule) in a manner similar to a poxvirus polypeptide. Bioactive agents include, for example, small molecules, nucleic acids (such as aptamers, siRNAs, antisense nucleic acids), antibodies and fragments thereof, and fusion proteins (such as peptide-Fc fusion proteins and RPTP Ig region-Fc fusion proteins). An agent may interact with and bind to at least one of LAR, RPTP-δ, and RPTP-σ at a location on the RPTP that is the same location or proximal to the same location as where A41L or 130L binds. Alternatively, alteration of immunoresponsiveness by an agent in a manner similar to the effect of A41L (or 130L) may result from binding or interaction of the agent with the RPTP at a location distal from that at which the poxvirus polypeptide binds. Binding studies, including competitive binding assays, and functional assays, which indicate the level of immunoresponsiveness of a cell, may be performed according to methods described herein and practiced in the art to determine and compare the capability and level with which an agent binds to and affects the immunoresponsiveness of an immune cell.

[0186] Methods are provided herein for identifying an agent that alters (e.g., suppresses or enhances in a statistically or biologically significant manner) immunoresponsiveness of an immune cell and for characterizing and determining the level of suppression or enhancement of such an agent once identified. Such methods, which are discussed in greater detail herein and are familiar to persons skilled in the art, which include but are not limited to, binding assays, such as immunoassays (e.g., ELISA, radioimmunoassay, immunoblot, etc.), competitive binding assays, and surface plasmon resonance. These methods comprise contacting (mixing, combining with, or in some manner permitting interaction) among a (1) candidate agent; (2) an immune cell that expresses at least one of LAR, RPTP-σ, and RPTP-δ; and (3) a poxvirus polypeptide, such as A41L or 130L, under conditions and for a time sufficient to permit interaction between the at least one RPTP polypeptide and the poxvirus polypeptide. Conditions for a particular assay include temperature, buffers (including salts, cations, media), and other components that maintain the integrity of the cell, the agent, and the poxvirus polypeptide with which a person skilled in the art will be familiar and/or which can be readily determined. The interaction or level of binding of A41L (or 130L) to the immune cell in the presence of the candidate agent can be readily determined and compared with the level of binding of A41L (or 130L) to the cell in the absence of the agent. A decrease in the level of binding of A41L (or 130L) to the immune cell in the presence of the candidate agent indicates that the candidate agent suppresses immunoresponsiveness of the immune cell.

[0187] In another embodiment, a method for identifying an agent that alters (suppresses or enhances) immunoresponsiveness of an immune cell comprises determining the level of immunoresponsiveness of an immune cell that expresses at least one of LAR, RPTP-σ, and RPTP-δ in the presence of the agent. In certain specific embodiments, an agent is identified that suppresses immunoresponsiveness of an immune cell. Immunoresponsiveness may be determined according to methods practiced in the art such as measuring levels of cytokines, proliferation, and stimulation. Immunoresponsiveness of an immune cell may also be determined by evaluating changes in cell adhesion and cell migration and by examining the tyrosine phosphorylation pattern of cellular proteins, including but not limited to cytoskeletal proteins and other proteins that affect cell adhesion and migration.

[0188] Numerous assays and techniques are practiced by persons skilled in the art for determining the interaction between or binding between a biological molecule and a cognate ligand. Accordingly, interaction between a poxvirus polypeptide such as A41L or 130L, and any one or more of LAR, RPTP-σ, and RPTP-δ, including the effect of a bioactive agent on this interaction and/or binding in the presence of the agent, can be readily determined by such assays and techniques as described in detail herein.

Small Molecules

[0189] Bioactive agents may also include natural and synthetic molecules, for example, small molecules that bind to a poxvirus polypeptide (e.g., A41L or 130L), or to one or more of LAR, RPTP-σ, and RPTP-δ, and/or to a complex between the poxvirus polypeptide (e.g., A41L or 130L) and any one of LAR, RPTP-σ, and RPTP-δ. Candidate agents for use in a method of screening for an agent that alters (suppresses or enhances) immunoresponsiveness of an immune cell and/or that inhibits binding of the poxvirus polypeptide (e.g., A41L or 130L) to at least one, at least two, or all three of LAR, RPTP-σ, and RPTP-δ, may be provided as “libraries” or collections of compounds, compositions, or molecules.

[0190] Such molecules typically include compounds known in the art as “small molecules” and have molecular weights less than 10⁵ daltons, less than 10⁴ daltons, or less than 10³ daltons. For example, members of a library of test compounds can be administered to a plurality of samples, each containing at least one tyrosine phosphatase polypeptide as provided herein, and then the samples are assayed for their capability to enhance or inhibit LAR, RPTP-σ, and/or RPTP-δ-mediated dephosphorylation of, or binding to, a substrate, the capability to inhibit or enhance binding of the phosphatase to the poxvirus polypeptide (e.g., A41L or 130L); and/or the capability of the test compounds to modulate immunoresponsiveness of immune cells. Compounds so identified as capable of affecting at least one function of the poxvirus polypeptide LAR, RPTP-σ, and/or RPTP-ε are valuable for therapeutic and/or diagnostic purposes, since they permit treatment and/or detection of diseases associated with LAR, RPTP-σ, and/or RPTP-δ activity. Such compounds are also valuable in research directed to molecular signaling mechanisms that involve any one or more of LAR, RPTP-σ, and/or RPTP-δ.

[0191] Candidate agents further may be provided as members of a combinatorial library, which preferably includes synthetic agents prepared according to a plurality of predetermined chemical reactions performed in a plurality of reaction vessels. For example, various starting compounds may be prepared according to one or more of solid-phase synthesis, recorded random mix methodologies, and recorded reaction split techniques that permit a given constituent to traceably undergo a plurality of permutations and/or combinations of reaction conditions. The resulting products comprise a library that can be screened followed by iterative selection and synthesis procedures, such as a synthetic combinatorial library of peptides (see e.g., International Patent Application Nos. PCT/US91/08694 and PCT/US91/04666) or other compositions that may include small molecules as provided herein (see, e.g., International Patent Application No. PCT/US94/08542, EP Patent No. 0774464, U.S. Pat. No. 5,798,035, U.S. Pat. No. 5,789,172, U.S. Pat. No. 5,751,629, which are hereby incorporated by reference in their entireties). Those having ordinary skill in the art will appreciate that a diverse assortment of such libraries may be prepared according to established procedures and tested according to the present disclosure.

[0192] Examples of methods for the synthesis of molecular libraries can be found in the art, for example in DeWitt et al., Proc. Natl. Acad. Sci. U.S.A. 90:6909 (1993); Erb et al.,Proc. Natl. Acad. Sci. USA 91:11422 (1994); Zuckermann et al., J. Med. Chem. 37:2678 (1994); Cho et al., Science 261:1303 (1993); Carrell et al., Angew. Chem. Int. Ed. Engl. 33:2059 (1994); Carell et al., Angew. Chem. Int. Ed. Engl. 33:2061 (1994); and in Gallop et al., J. Med. Chem. 37:1233 (1994). Libraries of compounds may be presented in solution (e.g., Houghten, Biotechniques 13:412-21(1992)); or on beads (Lam, Nature 354:82-84 (1991)); chips (Fodor, Nature 364:555-56 (1993)); bacteria (Ladner, U.S. Pat. No. 5,223,409); spores (Ladner, supra); plasmids (Cull et al., Proc. Natl. Acad. Sci. USA 89:1865-69(1992)); or on phage (Scott and Smith, Science 249:386-390 (1990); Devlin, Science 249:404-406 (1990); Cwirla et al., Proc. Natl. Acad. Sci. USA 87:6378-82 (1990); Felici, J. Mol. Biol. 222:301-10 (1991); Ladner, supra).

Peptide-Immunoglobulin Constant Region Fusion Polypeptides

[0193] In one embodiment, a bioactive agent that is used for altering the immunoresponsiveness of an immune cell and that may be used for treating an immunological disease or disorder is a peptide-immunoglobulin (Ig) constant region fusion polypeptide, which includes a peptide-IgFc fusion polypeptide. The peptide may be any naturally occurring or recombinantly prepared molecule. A peptide-Ig constant region fusion polypeptide, such as a peptide-IgFc fusion polypeptide (also referred to in the art as a peptibody (see, e.g., U.S. Pat. No. 6,660,843)), comprises a biologically active peptide or polypeptide capable of altering the activity of a protein of interest, such as an RPTP ((LAR, RPTP-σ, and/or RPTP-δ) expressed by an immune cell, that is fused with a portion, at least one constant region domain (e.g., CH1, CH2, CH3, and/or CH4), or the Fc polypeptide (CH2-CH3) of an immunoglobulin. The Fc polypeptide is also referred to herein as the Fc portion or the Fc region.

[0194] In one embodiment, the peptide portion of the fusion polypeptide is capable of interacting with or binding to at least one of, at least two of, or all three of LAR, RPTP-σ, and RPTP-δ, and effecting the same biological activity as a poxvirus polypeptide (e.g., A41L or 130L) when it binds to at least one of the RPTPs, thus suppressing (inhibiting, preventing, decreasing, or abrogating) the immunoresponsiveness of the immune cell expressing the RPTP. Methods are provided herein for identifying a peptide that is capable of altering (e.g., suppressing) immunoresponsiveness of an immune cell (that is, a peptide that acts as an A41L or 130L mimic). For example, such a peptide may be identified by determining its capability to inhibit or block binding of A41L (or 130L) to a cell that expresses at least one of the RPTPs. Alternatively, a candidate peptide may be permitted to contact or interact with an immune cell that expresses at least one of the RPTPs, and the capability of the candidate peptide to suppress or enhance immunoresponsiveness of the immune cell can be measured according to methods described herein and practiced in the art. Candidate peptides may be provided as members of a combinatorial library, which includes synthetic peptides prepared according to a plurality of predetermined chemical reactions performed in a plurality of reaction vessels. For example, various starting peptides may be prepared according to standard peptide synthesis techniques with which a skilled artisan will be familiar.

[0195] Peptides that alter the immunoresponsiveness of an immune cell may be identified and isolated from combinatorial libraries (see, e.g., International Patent Application Nos. PCT/US91/08694 and PCT/US91/04666) and from phage display peptide libraries (see, e.g., Scott et al., Science 249:386 (1990); Devlin et al., Science 249:404 (1990); Cwirla et al., Science 276: 1696-99 (1997); U.S. Pat. No. 5,223,409; U.S. Pat. No. 5,733,731; U.S. Pat. No. 5,498,530; U.S. Pat. No. 5,432,018; U.S. Pat. No. 5,338,665; 1994; U.S. Pat. No. 5,922,545; International Application Publication Nos. WO 96/40987 and WO 98/15833). In phage display peptide libraries, random peptide sequences are fused to a phage coat protein such that the peptides are displayed on the external surface of a filamentous phage particle. Typically, the displayed peptides are contacted with a ligand or binding molecule of interest to permit interaction between the peptide and the ligand or binding molecule, unbound phage are removed, and the bound phage are eluted and subsequently enriched by successive rounds of affinity purification and repropagation. The peptides with the greatest affinity for the ligand or binding molecule or target molecule of interest (e.g., the RPTPs described herein) may be sequenced to identify key residues, which may identify peptides within one or more structurally related families of peptides. Comparison of sequences of peptides may also indicate which residues in such peptides may be safely substituted or deleted by mutagenesis. These peptides may then be incorporated into additional peptide libraries that can be screened and peptides with optimized affinity can be identified.

[0196] Additional methods for identifying peptides that may alter the immunoresponsiveness of an immune cell and thus be useful for treating and/or preventing an immunological disease or disorder include, but are not limited to, (1) structural analysis of protein-protein interaction such as analyzing the crystal structure of the RPTP target (see, e.g., Jia, Biochem. Cell Biol. 75:17-26 (1997)) to identity and to determine the orientation of critical residues of the RPTP, which will be useful for designing a peptide (see, e.g., Takasaki et al., Nature Biotech. 15: 1266-70 (1997)); (2) a peptide library comprising peptides fused to a peptidoglycan-associated lipoprotein and displayed on the outer surface of bacteria such as E. coli; (3) generating a library of peptides by disrupting translation of polypeptides to generate RNA-associated peptides; and (4) generating peptides by digesting polypeptides with one or more proteases. (See also, e.g., U.S. Pat. Nos. 6,660,843; 5,773,569; 5,869,451; 5,932,946; 5,608,035; 5,786,331; 5,880,096). A peptide may comprise any number of amino acids between 3 and 75 amino acids, 3 and 60 amino acids, 3 and 50 amino acids, 3 and 40 amino acids, 3 and 30 amino acids, 3 and 20 amino acids, or 3 and 10 amino acids. A peptide that has the capability of alter the immunoresponsiveness of an immune cell (e.g., in certain embodiments, to suppress the immunoresponsiveness of the immune cell and in certain other embodiments, to enhance immunoresponsiveness of the immune cell) may also be further derivatized to add or insert amino acids that are useful for constructing a peptide-Ig constant region fusion protein (such as amino acids that are linking sequences or that are spacer sequences).

[0197] A peptide that may be used to construct a peptide-Ig constant region fusion polypeptide (including a peptide-IgFc fusion polypeptide) may be derived from a poxvirus polypeptide, such as an A41L polypeptide or 130L polypeptide. A41L or 130L peptides may be randomly generated by proteolytic digestion using any one or more of various proteases, isolated, and then analyzed for their capability to alter the immunoresponsiveness of an immune cell. Such peptides may also be generated using recombinant methods described herein and practiced in the art. Randomly generated peptides may also be used to prepare peptide combinatorial libraries or phage libraries as described herein and in the art. Alternatively, the amino acid sequences of portions of A41L or 130L that interact with LAR, RPTP-σ, and/or RPTP-δ may be determined by computer modeling of the phosphatase, or of a portion of the phosphatase, for example, the extracellular portion or the Ig domains, and/or x-ray crystallography (which may include preparation and analysis of crystals of the phosphatase only or of the phosphatase-viral polypeptide complex).

[0198] As described in detail above, an Fc polypeptide of an immunoglobulin comprises the heavy chain CH2 domain and CH3 domain and a portion of or the entire hinge region that is located between CH1 and CH2. Fc regions are monomeric polypeptides that may be linked into dimeric or multimeric forms by covalent (e.g., particularly disulfide bonds) and non-covalent association. The number of intermolecular disulfide bonds between monomeric subunits of Fc polypeptides varies depending on the immunoglobulin class (e.g., IgG, IgA, IgE) or subclass (e.g., human IgG1, IgG2, IgG3, IgG4, IgA1, IgA2). Presently, an Fc polypeptide, and any one or more constant region domains, and fusion proteins comprising at least one immunoglobulin (Ig) constant region domain can be readily prepared according to recombinant molecular biology techniques with which a skilled artisan is quite familiar.

[0199] The Fc polypeptide is preferably prepared using the nucleotide and the encoded amino acid sequences derived from the animal species for whose use the peptide-IgFc fusion polypeptide is intended. In one embodiment, the Fc polypeptide is of human origin and may be from any of the immunoglobulin classes, such as human IgG1 and IgG2.

[0200] An Fc polypeptide as described herein also includes Fc polypeptide variants. One such Fc polypeptide variant has one or more cysteine residues (such as one or more cysteine residues in the hinge region) that forms a disulfide bond with another Fc polypeptide substituted with another amino acid, such as serine, to reduce the number of disulfide bonds formed between two Fc polypeptides. Alternatively, one or more cysteine residues may be deleted from the wildtype hinge of the Fc polypeptide.

[0201] Another example of an Fc polypeptide variant is a variant that has one or more amino acids involved in an effector function substituted or deleted such that the Fc polypeptide has a reduced level of an effector function. For example, amino acids in the Fc region may be substituted to reduce or abrogate binding of a component of the complement cascade (see, e.g., Duncan et al., Nature 332:563-64 (1988); Morgan et al., Immunology 86:319-24 (1995)) or to reduce or abrogate the ability of the Fc polypeptide to bind to an IgG Fc receptor expressed by an immune cell (Wines et al., J. Immunol. 164:5313-18 (2000); Chappel et al., Proc. Natl. Acad. Sci. USA 88:9036 (1991); Canfield et al., J. Exp. Med. 173:1483 (1991); Duncan et al., supra); or to alter antibody-dependent cellular cytotoxicity. Such an Fc polypeptide variant that differs from the wildtype Fc polypeptide is also called herein a mutein Fc polypeptide.

[0202] In one embodiment, a peptide as described herein is fused in frame with an Fc polypeptide that comprises at least one substitution of a residue that in the wildtype Fc region polypeptide contributes to binding of an Fc polypeptide or immunoglobulin to one or more IgG Fc receptors expressed on certain immune cells. Such a mutein Fc polypeptide comprises at least one substitution of an amino acid residue in the CH2 domain of the mutein Fc polypeptide, such that the capability of the fusion polypeptide to bind to an IgG Fc receptor, such as an IgG Fc receptor present on the surface of an immune cell, is reduced. The types of Fc IgG receptors expressed on human leukocytes are described in detail above.

[0203] Residues in the amino terminal portion of the CH2 domain that contribute to IgG Fc receptor binding include residues at positions Leu234-Ser239 (Leu-Leu-Gly-Gly-Pro-Ser (SEQ ID NO:80) (EU numbering system, Kabat et al., supra) (see, e.g., Morgan et al., Immunology 86:319-24 (1995), and references cited therein). These positions correspond to positions 15-20 of the amino acid sequence of a human IgG1 Fc polypeptide (SEQ ID NO:79). Substitution of the amino acid at one or more of these six positions (i.e., one, two, three, four, five, or all six) in the CH2 domain results in a reduction of the capability of the Fc polypeptide to bind to one or more of the IgG Fc receptors (or isoforms thereof) (see, e.g., Burton et al., Adv. Immunol. 51:1 (1992); Hulett et al., Adv. Immunol. 57:1 (1994); Jefferis et al., Immunol. Rev. 163:59 (1998); Lund et al., J. Immunol. 147:2657 (1991); Sarmay et al., Mol. Immunol. 29:633 (1992); Lund et al., Mol. Immunol. 29:53 (1992); Morgan et al., supra). In addition to substitution of one or more amino acids at EU positions 234-239, one, two, or three or more amino acids adjacent to this region (either to the carboxy terminal side of position 239 or to the amino terminal side of position 234) may also be substituted.

[0204] By way of example, substitution of the leucine residue at position 235 (which corresponds to position 16 of SEQ ID NO:79) with a glutamic acid residue or an alanine residue abolishes or reduces, respectively, the affinity of an immunoglobulin (such as human IgG3) for FcγRI (Lund et al., 1991, supra; Canfield et al., supra; Morgan et al., supra). As another example, replacement of the leucine residues at positions 234 and 235 (which correspond to positions 15 and 16 of SEQ ID NO:79), for example, with alanine residues, abrogates binding of an immunoglobulin to FcγRIIa (see, e.g., Wines et al., supra). Alternatively, leucine at position 234 (which corresponds to position 15 of SEQ ID NO:79), leucine at position 235 (which corresponds to position 16 of SEQ ID NO:79), and glycine at position 237 (which corresponds to position 18 of SEQ ID NO:79), each may be substituted with a different amino acid, such as leucine at position 234 may be substituted with an alanine residue (L234A), leucine at 235 may be substituted with an alanine residue (L235A) or with a glutamic acid residue (L235E), and the glycine residue at position 237 may be substituted with another amino acid, for example an alanine residue (G237A).

[0205] In one embodiment, a mutein Fc polypeptide that is fused in frame to a viral polypeptide (or variant or fragment thereof) comprises one, two, three, four, five, or six mutations at positions 15-20 of SEQ ID NO:79 that correspond to positions 234-239 of a human IgG1 CH2 domain (EU numbering system) as described herein. An exemplary mutein Fc polypeptide has the amino acid sequence set forth in SEQ ID NO:77 in which substitutions corresponding to (L234A), (L235E), and (G237A) may be found at positions 13, 14, and 16 of SEQ ID NO:77.

[0206] In another embodiment, a mutein Fc polypeptide comprises a mutation of a cysteine residue in the hinge region of an Fc polypeptide. In one embodiment, the cysteine residue most proximal to the amino terminus of the hinge region of an Fc polypeptide (e.g., for example, the cysteine residue most proximal to the amino terminus of the hinge region of the Fc portion of a wildtype IgG1 immunoglobulin) is deleted or substituted with another amino acid. That is, by way of illustration, the cysteine residue at position 1 of SEQ ID NO:79 is deleted, or the cysteine residue at position 1 is substituted with another amino acid that is incapable of forming a disulfide bond, for example, with a serine residue. In another embodiment, a mutein Fc polypeptide comprises a deletion or substitution of the cysteine residue most proximal to the amino terminus of the hinge region of an Fc polypeptide further comprises deletion or substitution of the adjacent C-terminal amino acid. In a certain embodiment, this cysteine residue and the adjacent C-terminal residue are both deleted from the hinge region of a mutein Fc polypeptide. In a specific embodiment, the cysteine residue at position 1 of SEQ ID NO:79 and the aspartic acid at position 2 of SEQ ID NO:79 are deleted. Fc polypeptides that comprise deletion of these cysteine and aspartic acid residues in the hinge region may be efficiently expressed in a host cell, and in certain instances, may be more efficiently expressed in a cell than an Fc polypeptide that retains the wildtype cysteine and aspartate residues.

[0207] In a specific embodiment, a mutein Fc polypeptide comprises the amino acid sequence set forth in SEQ ID NO:77, which differs from the wildtype Fc polypeptide (SEQ ID NO:79) wherein the cysteine residue at position 1 of SEQ ID NO:79 is deleted and the aspartic acid at position 2 of SEQ ID NO:79 is deleted and the leucine reside at position 15 of SEQ ID NO:79 is substituted with an alanine residue, the leucine residue at position 16 is substituted with a glutamic acid residue, and the glycine at position 18 is substituted with an alanine residue (see also FIG. 5). Thus, an exemplary mutein Fc polypeptide comprises an amino acid sequence at its amino terminal portion of KTHTCPPCPAPEAEGAPS (SEQ ID NO:81) (see SEQ ID NO:77, an exemplary Fc mutein sequence).

[0208] Other Fc variants encompass similar amino acid sequences of known Fc polypeptide sequences that have only minor changes, for example by way of illustration and not limitation, covalent chemical modifications, insertions, deletions and/or substitutions, which may further include conservative substitutions. Amino acid sequences that are similar to one another may share substantial regions of sequence homology. Similarly, nucleotide sequences that encode the Fc variants may encompass substantially similar nucleotide sequences and have only minor changes, for example by way of illustration and not limitation, covalent chemical modifications, insertions, deletions, and/or substitutions, which may further include silent mutations owing to degeneracy of the genetic code. Nucleotide sequences that are similar to one another may share substantial regions of sequence homology.

[0209] An Fc polypeptide or at least one immunogloblulin constant region, or portion thereof, when fused to a peptide or polypeptide of interest acts, at least in part, as a vehicle or carrier moiety that prevents degradation and/or increases half-life, reduces toxicity, reduces immunogenicity, and/or increases biological activity of the peptide such as by forming dimers or other multimers (see, e.g., U.S. Pat. Nos. 6,018,026; 6,291,646; 6,323,323; 6,300,099; 5,843,725). (See also, e.g., U.S. Pat. No. 5,428,130; U.S. Pat. No. 6,660,843; U.S. Patent Application Publication Nos. 2003/064480; 2001/053539; 2004/087778; 2004/077022; 2004/071712; 2004/057953/2004/053845/2004/044188; 2004/001853; 2004/082039). Alternative moieties to an immunoglobulin constant region such as an Fc polypeptide that may be linked or fused to a peptide that alters the immunoresponsiveness of an immune cell include, for example, a linear polymer (e.g., polyethylene glycol, polylysine, dextran, etc.; see, for example, U.S. Pat. No. 4,289,872; International Patent Application Publication No. WO 93/21259); a lipid; a cholesterol group (such as a steroid); a carbohydrate or oligosaccharide.

Nucleic Acid Molecules

[0210] In certain embodiments, polynucleotides and oligonucleotides are provided that are complementary to at least a portion of a sequence encoding an RPTP (LAR, RPTP-σ, or RPTP-δ) (e.g., a short interfering nucleic acid, an antisense polynucleotide, a ribozyme, or a peptide nucleic acid) and that may be used to alter gene and/or protein expression. As described herein, these polynucleotides that specifically bind to or hybridize to nucleic acid molecules that encode an RPTP (LAR, RPTP-σ, or RPTP-δ) may be prepared using the nucleotide sequences provided herein and available in the art (e.g., SEQ ID NOS:23 and 27 that encode LAR; SEQ ID NOS:30, 32, 34, 36 that encode RPTP-σ; and SEQ ID NOS:38, 40, 42, 44 that encode RPTP-δ). In another embodiment, nucleic acid molecules such as aptamers that are not sequence-specific may also be used to alter gene and/or protein expression.

RNA Interference (RNAi)

[0211] By way of background, RNA interference refers to the process of sequence-specific post-transcriptional gene silencing in animals mediated by short interfering RNAs (siRNAs) (Zamore et al., Cell, 101:25-33 (2000); Fire et al., Nature 391:806 (1998); Hamilton et al., Science 286:950-51 (1999); Lin et al., Nature 402:128-29 (1999); Sharp, Genes & Dev. 13:139-41 (1999); and Strauss, Science 286:886 (1999); Sandy et al., Biotechniques 39:215-24 (2005)); U.S. Pat. Nos. 6,506,559; 6,573,099; International Patent Application Publication No. WO 01/75164). Inhibition is sequence-specific in that a nucleotide sequence from a portion of the target gene (for example, a gene expressing an RPTP described herein) is chosen to produce inhibitory RNA. The process of post-transcriptional gene silencing is thought to be a cellular defense mechanism used to prevent the expression of foreign genes (Fire et al., Trends Genet. 15:358 (1999)). The process comprises introducing into the cell a nucleic acid molecule, generally, RNA, with partial or fully double-stranded character. The presence of dsRNA in cells triggers the RNAi response through a mechanism that has yet to be fully characterized. This mechanism appears to be different from other mechanisms involving double stranded RNA-specific ribonucleases, such as the interferon response that results from dsRNA-mediated activation of protein kinase PKR and 2′,5′-oligoadenylate synthetase resulting in non-specific cleavage of mRNA by ribonuclease L (see, e.g., U.S. Pat. Nos. 6,107,094; 5,898,031; Clemens et al., J. Interferon Cytokine Res. 17:503-24 (1997); Adah et al., Curr. Med. Chem. 8:1189 (2001)).

[0212] The presence of long dsRNAs in cells stimulates the activity of a ribonuclease III enzyme referred to as dicer (Bass, Cell 101:235 (2000); Zamore et al., Cell, 101:25-33 (2000); Hammond et al., Nature 404:293 (2000)). Dicer is involved in the processing of the dsRNA into the short pieces of dsRNA known as siRNAs (Zamore et al., Cell 101:25-33 (2000); Bass, Cell 101:235 (2000); Berstein et al., Nature 409:363 (2001)). Short interfering RNAs derived from dicer activity are typically about 21 to about 23 nucleotides in length and comprise about 19 base pair duplexes (e.g., a 21-22 nucleotide long dsRNA molecule that contains a 19-base pair duplex core and two unpaired nucleotides at each 3′ end) (Zamore et al., 2000, supra; Elbashir et al., 2001, supra; Dykxhoorn et al., Nat. Rev. Mol. Cell Biol. 4:457-67 (2003)). Dicer has also been implicated in the excision of 21- and 22-nucleotide small temporal RNAs (stRNAs) from precursor RNA of conserved structure that are implicated in translational control (Hutvagner et al., Science 293:834 (2001)). The RNAi response also features an endonuclease complex, commonly referred to as an RNA-induced silencing complex (RISC), which mediates cleavage of single-stranded RNA having sequence complementary to the antisense strand of the siRNA duplex. Cleavage of the target RNA occurs in the middle of the region complementary to the antisense strand of the siRNA duplex (Elbashir et al., 2001, supra).

[0213] Short interfering RNAs may be used for modulating (decreasing or inhibiting) the expression of LAR, RPTP-σ, and/or RPTP-δ genes. The disclosure herein relates to compounds, compositions, and methods useful for modulating the expression and activity of genes that encode the RPTPs, LAR, RPTP-σ, and RPTP-δ, by RNA interference using small nucleic acid molecules. In particular, small nucleic acid molecules, such as short interfering RNA (siRNA), micro-RNA (miRNA), and short hairpin RNA (shRNA) molecules may be used according to the methods described herein to modulate the expression of LAR, RPTP-σ, and/or RPTP-δ, or variants thereof. A siRNA polynucleotide preferably comprises a double-stranded RNA (dsRNA) but may comprise a single-stranded RNA (see, e.g., Martinez et al. Cell 110:563-74 (2002)). A siRNA polynucleotide may comprise other naturally occurring, recombinant, or synthetic single-stranded or double-stranded polymers of nucleotides (ribonucleotides or deoxyribonucleotides or a combination of both) and/or nucleotide analogues as provided herein and known and used by persons skilled in the art.

[0214] At least one strand of a double-stranded siRNA polynucleotide has at least one, and preferably two nucleotides that “overhang” (i.e., that do not base pair with a complementary base in the opposing strand) at the 3′ end of either strand, or preferably both strands, of the siRNA polynucleotide. Typically, each strand of the siRNA polynucleotide duplex has a two-nucleotide overhang at the 3′ end. The two-nucleotide overhang may be a thymidine dinucleotide (TT) or may comprise other bases, for example, a TC dinucleotide or a TG dinucleotide, or any other dinucleotide (see, e.g., International Patent Application Publication No. WO 01/75164). Alternatively, the siRNA polynucleotide may have blunt ends, that is, each nucleotide in one strand of the duplex is perfectly complementary (e.g., by Watson-Crick base-pairing) with a nucleotide of the opposite strand.

[0215] A siRNA may be transcribed using as a template a DNA (genomic, cDNA, or synthetic) that contains a RNA polymerase promoter, for example, a U6 promoter or the H1 RNA polymerase III promoter, or the siRNA may be a synthetically derived RNA molecule. The double-stranded structure of an siRNA may be formed by a single self-complementary RNA strand or from two complementary RNA strands. RNA duplex formation may be initiated either inside or outside the cell. The RNA may be introduced in an amount to deliver at least one copy per cell or at least 5, 10, 50, 100, 250, 500, or 1000 copies per cell. Polynucleotides that are siRNA polynucleotides may be derived from a single-stranded polynucleotide that comprises a single-stranded oligonucleotide fragment (e.g., of about 15-30 nucleotides, of about 19-25 nucleotides, or of about 19-22 nucleotides, which should be understood to include any whole integer of nucleotides including and between 15 and 30) and its reverse complement, typically separated by a spacer sequence. According to certain such embodiments, cleavage of the spacer provides the single-stranded oligonucleotide fragment and its reverse complement, such that they may anneal to form the double-stranded siRNA polynucleotide. Optionally, additional processing steps may result in addition or removal of one, two, three or more nucleotides from the 3′ end and/or the 5′ end of either or both strands. In certain embodiments the spacer is of a length that permits the fragment and its reverse complement to anneal and form a double-stranded structure (e.g., like a hairpin polynucleotide) prior to cleavage of the spacer (and, optionally, subsequent processing steps that may result in addition or removal of one, two, three, four, or more nucleotides from the 3′ end and/or the 5′ end of either or both strands). A spacer sequence may therefore be any polynucleotide sequence that is situated between two complementary polynucleotide sequence regions which, when annealed into a double-stranded nucleic acid, comprise a siRNA polynucleotide. A spacer sequence may comprise at least 4 nucleotides, although in certain embodiments the spacer may comprise 5, 6, 7, 8, 9, 10, 11, 12, 13, 14, 15, 16, 17, 18, 19, 20, 21-25, 26-30, 31-40, 41-50, 51-70, 71-90, 91-110, 111-150, 151-200 or more nucleotides. Examples of siRNA polynucleotides derived from a single nucleotide strand comprising two complementary nucleotide sequences separated by a spacer have been described (e.g., Brummelkamp et al., 2002 Science 296:550; Paddison et al., 2002 Genes Develop. 16:948; Paul et al. Nat. Biotechnol. 20:505-508 (2002); Grabarek et al., Biotechniques 34:734-44 (2003)).

[0216] A vector suitable for expression of an siRNA polynucleotide may comprise a recombinant nucleic acid construct containing one or more promoters for transcription of an RNA molecule, for example, the human U6 snRNA promoter (see, e.g., Miyagishi et al, Nat. Biotechnol. 20:497-500 (2002); Lee et al., Nat. Biotechnol. 20:500-505 (2002); Paul et al., Nat. Biotechnol. 20:505-508 (2002); Grabarek et al., BioTechniques 34:73544 (2003); see also Sui et al., Proc. Natl. Acad. Sci. USA 99:5515-20 (2002)). Each strand of a siRNA polynucleotide may be transcribed separately, each under the direction of a separate promoter, and then may hybridize within the cell to form the siRNA polynucleotide duplex. Each strand may also be transcribed from separate vectors (see Lee et al., supra). Alternatively, the sense and antisense sequences specific for a RPTP (LAR, RPTP-σ, and/or RPTP-δ) sequence may be transcribed under the control of a single promoter such that the siRNA polynucleotide forms a hairpin molecule (Paul et al., supra). In this instance, the complementary strands of the siRNA specific sequences are separated by a spacer that comprises at least four nucleotides, but may comprise at least 5, 6, 7, 8, 9, 10, 11, 12, 13, 14, 15, 16, 17, or 18 nucleotides or more nucleotides as described herein. In addition, siRNAs transcribed under the control of a U6 promoter that form a hairpin may have a stretch of about four uridines at the 3′ end that act as the transcription termination signal (Miyagishi et al., supra; Paul et al., supra). By way of illustration, if the target sequence is 19 nucleotides, the siRNA hairpin polynucleotide (beginning at the 5′ end) has a 19-nucleotide sense sequence followed by a spacer (which has two uridine nucleotides adjacent to the 3′ end of the 19-nucleotide sense sequence), and the spacer is linked to a 19 nucleotide antisense sequence followed by a 4-uridine terminator sequence, which results in an overhang. Short interfering RNA polynucleotides with such overhangs effectively interfere with expression of the target polypeptide (see Miyagishi et al., supra; Paul et al., supra). A recombinant construct may also be prepared using another RNA polymerase III promoter, the H1RNA promoter, that may be operatively linked to siRNA polynucleotide specific sequences, which may be used for transcription of hairpin structures comprising the siRNA specific sequences or separate transcription of each strand of a siRNA duplex polynucleotide (see, e.g., Brummelkamp et al., Science 296:550-53 (2002); Paddison et al., supra). DNA vectors useful for insertion of sequences for transcription of an siRNA polynucleotide include pSUPER vector (see, e.g., Brummelkamp et al., supra); pAV vectors derived from pCWRSVN (see, e.g., Paul et al., supra); and pIND (see, e.g., Lee et al., supra), or the like.

[0217] RPTP polypeptides can be expressed in mammalian cells, yeast, bacteria, or other cells under the control of appropriate promoters, thus systems are provided and available for identifying and characterizing siRNA polynucleotides that are capable of interfering with polypeptide expression as provided herein. Appropriate cloning and expression vectors for use with prokaryotic and eukaryotic hosts are described, for example, by Sambrook, et al., Molecular Cloning: A Laboratory Manual, Third Edition, Cold Spring Harbor, N.Y., (2001).

[0218] These siRNAs may be used for inhibiting, decreasing, or abrogating expression of one or more of LAR, RPTP-σ, and RPTP-δ, or variants thereof, thus altering the immunoresponsiveness of an immune cell, and may be used for treating a subject or host who has an inflammatory or autoimmune disease, or a cardiovascular or metabolic disease related to expression or overexpression of one or more of the RPTPs. Interference of expression of rat LAR, RPTP-σ, and RPTP-δ in hippocampal neurons has been effective using siRNA molecules (Dunah et al., Nat. Neurosci. 8:458-67 (2005)).

[0219] In one embodiment, a siRNA molecule has RNAi activity that affects expression of LAR RNA, wherein the siRNA molecule comprises a sequence complementary to an RNA molecule that encodes an LAR polypeptide or variant thereof, including, but not limited to those sequences described herein. In another embodiment, a siRNA molecule has RNAi activity that affects expression of RPTP-σ or RPTP-δ RNA, wherein the siRNA molecule comprises a sequence complementary to an RNA that encodes a RPTP-σ or that encodes a RPTP-δ polypeptide, respectively, or variant thereof, including, but not limited to those sequences described herein. In certain other embodiments, a siRNA molecule has RNAi activity that affects expression of at least two of LAR RNA, RPTP-σ RNA, and RPTP-δ RNA. Such siRNAs that inhibit, effect a decrease, or abrogate expression of the at least two encoded RPTP(s) recognize, bind to, or hybridize to portions of the encoding sequence that are common and identical to the at least two RPTP nucleotide sequences. In another embodiment, a siRNA may inhibit, effect a decrease, or abrogate expression of LAR RNA, RPTP-σ RNA, and RPTP-δ RNA and recognize, bind to, or hybridize to portions of the encoding sequence that are common and identical to the all three RPTP nucleotide sequences.

[0220] As described herein nucleotide sequences that encode each of LAR, RPTP-σ, and RPTP-δ share sequence identity at particular locations in the polynucleotides. Such homologous or identical sequences can be identified according to methods known in the art and described herein, for example using sequence alignments. siRNA molecules can be designed to target such homologous sequences, for example using perfectly complementary sequences or by incorporating non-canonical base pairs, for example mismatches and/or wobble base pairs, that can provide additional target sequences (see, e.g., U.S. Patent Application No. 2005/0137155).

[0221] A siRNA molecule comprises an antisense strand having a nucleotide sequence that is complementary to a nucleotide sequence or a portion thereof encoding a LAR, RPTP-σ, and/or RPTP-δ polypeptide and may further comprise a sense strand, wherein the sense strand comprises a nucleotide sequence of a LAR, RPTP-σ, and/or RPTP-δ gene or mRNA, or a portion thereof. In one embodiment a siRNA molecule comprises an antisense strand having about 15, 16, 17, 18, 19, 20, or 21 nucleotides and in another embodiment about 19 to about 30 (e.g., about 19, 20, 21, 22, 23, 24, 25, 26, 27, 28, 29, or 30) nucleotides, wherein the antisense strand is complementary to a RNA sequence encoding one or more of LAR, RPTP-σ, and RPTP-δ. In certain other embodiments, the siRNA further comprises a sense strand having about 16, 17, 18, 19, 20, or 21 nucleotides and in another embodiment about 19 to about 30 (e.g., about 19, 20, 21, 22, 23, 24, 25, 26, 27, 28, 29, or 30) nucleotides. The sense strand and the antisense strand are distinct nucleotide sequences with at least about 19 complementary nucleotides. The nucleotide sequence of the siRNA polynucleotide may be identical to portion of a polynucleotide sequence that encodes an RPTP as described herein or the nucleotide sequence may differ by one, two, three, or four nucleotides. Single point mutations relative to the target sequence have been found to be effective for inhibition.

[0222] A variety of algorithms are available for determining the sequence of siRNA molecules. In general, regions of a target polynucleotide sequence to be avoided when designing an siRNA include (1) regions within 50-100 base pairs of the start codon or the termination codon; (2) intron regions; (3) stretches of 4 or more identical bases; (4) regions with GC content less than 30% or greater than 60%; and (5) repeats and low complex sequence. One algorithm that may be used for designing a siRNA that inhibits expression of a LAR, RPTP-σ, and/or RPTP-δ gene or mRNA is referred to as the Tuschl rules (Elbashir et al., Nature 411:494-98 (2001); Elbashir et al. EMBO J. 20:6877-88 (2001); Elbashir et al., Methods 26:199-213 (2002)). A target region is selected that is 50-100 nucleotides downstream of a start codon, which sequence comprises in order of preference (1) 23 nucleotides sequence motif AA(N₁₉); (2) 23 nucleotide sequence motif (NA(N₂₁); convert the 3′ end of the sense siRNA to TT; (3) NAR(N₁₇)YNN, wherein R=A or G (purine); Y-T or C (pyrimidine), and N=any nucleotide. The target sequence should have a GC content of approximately 50%. Another method referred to as rational siRNA design (Dharmacon, Inc.) assigns point values to particular sequence characteristics (see, e.g., Reynolds et al., Nat. Biotechnol. 22:326-30 (2004)). In addition, several vendors design and manufacture siRNA molecules based on the target sequence using proprietary algorithms (see, e.g., Ambion, Inc., Austin, Tex., algorithm developed by Cenix Bioscience; Qiagen, Inc., Valencia, Calif.).

[0223] A siRNA can be unmodified or chemically-modified and can be chemically synthesized, expressed from a vector, or enzymatically synthesized. The use of chemically-modified siRNA improves various properties of native siRNA molecules by, for example, increasing resistance to nuclease degradation in vivo and/or through improved cellular uptake (see, e.g., U.S. Patent Application No. 2005/0137155).

[0224] Inhibition of gene expression refers to the absence (or observable decrease) in the level of protein and/or mRNA product from a target gene encoding LAR, RPTP-σ, or RPTP-δ. Specificity refers to the ability to inhibit the target gene without manifest effects on other genes of the cell. The consequences of inhibition can be confirmed by examination of properties of the cell or organism or by biochemical techniques such as RNA solution hybridization, nuclease protection, Northern hybridization, reverse transcription, gene expression monitoring with a microarray, antibody binding, enzyme linked immunosorbent assay (ELISA), Western blotting, radioimmunoassay (RIA), other immunoassays, and fluorescence activated cell analysis (FACS). For RNA-mediated inhibition in a cell line or whole organism, gene expression is conveniently assayed by use of a reporter or drug resistance gene whose protein product is easily assayed. Examples of reporter genes include acetohydroxyacid synthase (AHAS), alkaline phosphatase (AP), beta galactosidase (LacZ), beta glucoronidase (GUS), chloramphenicol acetyltransferase (CAT), green fluorescent protein (GFP), horseradish peroxidase (HRP), luciferase (Luc), nopaline synthase (NOS), octopine synthase (OCS), and derivatives thereof. Multiple selectable markers are available that confer resistance to ampicillin, bleomycin, chloramphenicol, gentamycin, hygromycin, kanamycin, lincomycin, methotrexate, phosphinothricin, puromycin, and tetracycline.

[0225] Antisense Polynucleotides and Ribozymes

[0226] Antisense polynucleotides bind in a sequence-specific manner to nucleic acids such as mRNA or DNA. Identification of oligonucleotides and ribozymes for use as antisense agents and identification of DNA encoding the genes for targeted delivery involve methods well known in the art. For example, the desirable properties, lengths, and other characteristics of such oligonucleotides are well known. Antisense technology can be used to control gene expression through interference with binding of polymerases, transcription factors, or other regulatory molecules (see Gee et al., In Huber and Carr, Molecular and Immunologic Approaches, Futura Publishing Co. (Mt. Kisco, N.Y.; 1994)). An antisense polynucleotide may also alter gene expression of any one of LAR, RPTP-σ, and/or RPTP-δ by specifically hybridizing to a portion of the encoding gene or mRNA that is untranslated and may be a sequence that is a regulatory sequence. Such an antisense molecule may be designed to hybridize with a control region of an RPTP gene (e.g., promoter, enhancer or transcription initiation site) and block transcription of the gene or block translation by inhibiting binding of a transcript to ribosomes.

[0227] When bound to mRNA that has complementary sequences, antisense prevents translation of the mRNA (see, e.g., U.S. Pat. No. 5,168,053; U.S. Pat. No. 5,190,931; U.S. Pat. No. 5,135,917; U.S. Pat. No. 5,087,617; Clusel et al., Nucleic Acids Res. 21:3405-3411 (1993), which describes dumbbell antisense oligonucleotides). Triplex molecules refer to single DNA strands that bind duplex DNA forming a colinear triplex molecule, thereby preventing transcription (see, e.g., U.S. Pat. No. 5,176,996, which describes methods for making synthetic oligonucleotides that bind to target sites on duplex DNA; see also, e.g., Helene, Anticancer Drug Des. 6:569-84 (1991); Helene et al., Ann. N.Y Acad. Sci. 660:27-36 (1992); Maher, Bioassays 14:807-15 (1992)).

[0228] An antisense polynucleotide comprises a nucleotide sequence that is complementary to a sense polynucleotide encoding a protein, for example, complementary to the coding strand of a double-stranded cDNA molecule or complementary to an mRNA sequence. Accordingly, an antisense polynucleotide can hydrogen bond to a sense polynucleotide. The antisense polynucleotide can be complementary to an entire RPTP coding strand, or to only a portion thereof. In one embodiment, an antisense polynucleotide molecule is antisense to a coding region of a polynucleotide that encodes LAR, RPTP-σ, or RPTP-δ. The antisense polynucleotide may comprise a sequence that is antisense to a portion of the nucleotide sequence that is unique to LAR, RPTP-σ, or RPTP-δ or may comprise a sequence that is antisense to a portion of the coding sequence that is similar or identical in each of the polynucleotides that encodes LAR, RPTP-σ, or RPTP-δ. The term coding region refers to the region of the nucleotide sequence comprising codons that are translated into amino acid residues. In another embodiment, the antisense nucleic acid molecule is antisense to a “noncoding region” of the coding strand of a nucleotide sequence encoding any one of LAR, RPTP-σ, or RPTP-δ. The term “noncoding region” refers to 5′ and 3′ sequences that flank the coding region that are not translated into amino acids (i.e., also referred to as 5′ and 3′ untranslated regions).

[0229] Given the coding strand sequences encoding the RPTPs disclosed herein and available in the art, antisense polynucleotides can be designed according to the rules of Watson and Crick base pairing. The antisense polynucleotide can be complementary to the entire coding region of an RPTP mRNA, for example, or may be an oligonucleotide that is antisense to only a portion of the coding or noncoding region of the RPTP mRNA. For example, the antisense oligonucleotide can be complementary to the region surrounding the translation start site of the RPTP mRNA. An antisense oligonucleotide can be, for example, about 5, 10, 15, 20, 25, 30, 35, 40, 45 or 50 nucleotides or more in length. An antisense nucleic acid can be constructed using chemical synthesis and enzymatic ligation reactions using procedures known in the art. For example, an antisense nucleic acid (e.g., an antisense oligonucleotide) can be chemically synthesized using naturally occurring nucleotides or variously modified nucleotides designed to increase the biological stability of the molecules or to increase the physical stability of the duplex formed between the antisense and sense nucleic acids, e.g., phosphorothioate derivatives and acridine substituted nucleotides can be used.

[0230] Antisense oligonucleotides are typically designed to resist degradation by endogenous nucleolytic enzymes by using such linkages as phosphorothioate, methylphosphonate, sulfone, sulfate, ketyl, phosphorodithioate, phosphoramidate, phosphate esters, and other such linkages (see, e.g., Agrwal et al., Tetrahedron Lett. 28:3539-42 (1987); Miller et al., J. Am. Chem. Soc. 93:6657-65 (1971); Stec et al., Tetrahedron Lett. 26:2191-2194 (1985); Moody et al., Nucleic Acids Res. 12:4769-82 (1989); Uznanski et al., Nucleic Acids Res. 17:4863-71 (1989); Letsinger et al., Tetrahedron 40:137-43 (1984); Eckstein, Annu. Rev. Biochem. 54:367-402 (1985); Eckstein, Trends Biol. Sci. 14:97-100 (1989); Stein, In: Oligodeoxynucleotides. Antisense Inhibitors of Gene Expression, Cohen, ed., Macmillan Press, London, pp. 97-117 (1989); Jager et al., Biochemistry 27:7237-46 (1988)). Examples of modified nucleotides that can be used to generate the antisense nucleic acid include 5-fluorouracil, 5-bromouracil, 5-chlorouracil, 5-iodouracil, hypoxanthine, xantine, 4-acetylcytosine, 5-(carboxyhydroxylmethyl) uracil, 5-carboxymethylaminomethyl-2-thiouridine, 5-carboxymethylaminomethyluracil, dihydrouracil, beta-D-galactosylqueosine, inosine, N6-isopentenyladenine, 1-methylguanine, 1-methylinosine, 2,2-dimethylguanine, 2-methyladenine, 2-methylguanine, 3-methylcytosine, 5-methylcytosine, N6-adenine, 7-methylguanine, 5-methylaminomethyluracil, 5-methoxyaminomethyl-2-thiouracil, beta-D-mannosylqueosine, 5′-methoxycarboxymethyluracil, 5-methoxyuracil, 2-methylthio-N6-isopentenyladenine, uracil-5-oxyacetic acid (v), wybutoxosine, pseudouracil, queosine, 2-thiocytosine, 5-methyl-2-thiouracil, 2-thiouracil, 4-thiouracil, 5-methyluracil, uracil-5-oxyacetic acid methylester, uracil-5-oxyacetic acid (v), 5-methyl-2-thiouracil, 3-(3-amino-3-N-2-carboxypropyl) uracil, (acp3)w, and 2,6-diaminopurine. Alternatively, the antisense polynucleotide (or oligonucleotide) can be produced biologically using an expression vector into which a nucleic acid has been subcloned in an antisense orientation (i.e., RNA transcribed from the inserted nucleic acid will be of an antisense orientation to a target polynucleotide of interest.

[0231] An antisense polynucleotide that is specific for one or more polynucleotides that encodes LAR, RPTP-σ, or RPTP-δ is typically administered to a subject or generated in situ such that the antisense polynucleotide hybridizes with or binds to cellular mRNA and/or genomic DNA encoding the RPTP to thereby inhibit expression of the protein, e.g., by inhibiting transcription and/or translation. Hybridization can be by conventional nucleotide complementarity resulting in the formation of a stable duplex, or, for example, when an antisense polynucleotide binds to DNA duplexes, the antisense polynucleotide binds through specific interactions in the major groove of the double helix.

[0232] An antisense polynucleotide may be administered to a host or subject by direct injection at a tissue site. Alternatively, antisense polynucleotides can be modified or engineered to target selected cells and then administered systemically. For example, for systemic administration, antisense molecules can be modified such that they specifically bind to receptors or antigens expressed on a selected cell surface, e.g., by linking the antisense nucleic acid molecules to peptides or antibodies that bind to cell surface receptors or antigens. An antisense polynucleotide can also be delivered to cells using the vectors described herein and used in the art. To achieve sufficient intracellular concentrations of the antisense molecules, a vector may be constructed so that the antisense polynucleotide is placed under the control of a strong pol II or pol III promoter.

[0233] In yet another embodiment, the antisense polynucleotide is an α-anomeric nucleic acid molecule. An α-anomeric nucleic acid molecule forms specific double-stranded hybrids with complementary RNA in which, contrary to the usual β-units, the strands run parallel to each other (Gaultier et al. (1987) Nucleic Acids. Res. 15:6625-6641). The antisense nucleic acid molecule can also comprise a 2′-o-methylribonucleotide (Inoue et al. Nucleic Acids Res. 15:6131-6148(1987)) or a chimeric RNA-DNA analogue (Inoue et al. FEBS Lett. 215:327-330 (1987)).

[0234] In another embodiment, immunoresponsiveness of an immune cell may be altered by contacting a cell that expresses one or more of LAR, RPTP-σ, or RPTP-δ with a ribozyme. A ribozyme is a catalytic RNA molecule with ribonuclease activity that is capable of specifically cleaving a single-stranded nucleic acid, such as an mRNA, to which the ribozyme has a complementary region, resulting in specific inhibition or interference with cellular gene expression. At least five known classes of ribozymes are involved in the cleavage and/or ligation of RNA chains (e.g., hammerhead ribozymes, described in Haselhoff and Gerlach (Nature 334:585-591 (1988)). Ribozymes can be targeted to any RNA transcript and can catalytically cleave such transcripts (see, e.g., U.S. Pat. No. 5,272,262; U.S. Pat. No. 5,144,019; and U.S. Pat. Nos. 5,168,053, 5,180,818, 5,116,742 and 5,093,246). Thus, a ribozyme that is specific for an RPTP-encoding nucleic acid can be designed based upon the nucleotide sequence of an RPTP, as described herein and available in the art. For example, a derivative of a Tetrahymena L-19 IVS RNA can be constructed in which the nucleotide sequence of the active site is complementary to the nucleotide sequence to be cleaved in an RPTP-encoding mRNA. (See, e.g., Cech et al. U.S. Pat. No. 4,987,071; and Cech et al. U.S. Pat. No. 5,116,742.) Alternatively, an mRNA molecule that encodes an RPTP can be used to select a catalytic RNA that has a specific ribonuclease activity from a pool of RNA molecules (see, e.g., Bartel et al., Science 261:1411-18 (1993)).

[0235] Peptide Nucleic Acids

[0236] In another embodiment, peptide nucleic acids (PNAs) can be prepared by modifying the deoxyribose phosphate backbone of a polynucleotide (or a portion thereof) that encodes any one of the RPTPs described herein (see, e.g., Hyrup B. et al., Bioorganic & Medicinal Chemistry 4:5-23) (1996)). The terms “peptide nucleic acid” or “PNA” refers to a nucleic acid mimic, for example, a DNA mimic, in which the deoxyribose phosphate backbone is replaced by a pseudopeptide backbone wherein only the four natural nucleobases are retained. The neutral backbone of a PNA has been shown to allow for specific hybridization to DNA and RNA under conditions of low ionic strength. The synthesis of PNA oligomers can be performed using standard solid phase peptide synthesis protocols (see, e.g., Hyrup B., supra; Perry-O'Keefe et al., Proc. Natl. Acad. Sci. USA 93:14670-75 (1996)). A PNA molecule that is specific for one or more of LAR, RPTP-σ, and RPTP-δ can be used as an antisense or anti-gene agent for sequence-specific modulation of gene expression for example, by inducing transcription or translation arrest or by inhibiting replication.

[0237] Aptamers

[0238] Aptamers are DNA or RNA molecules, generally single-stranded, that have been selected from random pools based on their ability to bind other molecules, including nucleic acids, proteins, lipids, etc. Unlike antisense polynucleotides, short interfering RNA (siRNA), or ribozymes that bind to a polynucleotide that comprises a sequence that encodes a polypeptide of interest and that alter transcription or translation, aptamers can target and bind to polypeptides. Aptamers may be selected from random or unmodified oligonucleotide libraries by their ability to bind to specific targets, in this instance, LAR, RPTP-δ, and/or RPTP-σ (see, e.g., U.S. Pat. No. 6,867,289; U.S. Pat. No. 5,567,588). Aptamers have capacity to form a variety of two- and three-dimensional structures and have sufficient chemical versatility available within their monomers to act as ligands (i.e., to form specific binding pairs) with virtually any chemical compound, whether monomeric or polymeric. Molecules of any size or composition can serve as targets. An iterative process of in vitro selection may be used to enrich the library for species with high affinity to the target. This process involves repetitive cycles of incubation of the library with a desired target, separation of free oligonucleotides from those bound to the target, and amplification of the bound oligonucleotide subset, such as by using the polymerase chain reaction (PCR). From the selected sub-population of sequences that have high affinity for the target, a sub-population may be subcloned and particular aptamers examined in further detail to identify aptamers that alter a biological function of the target (see, e.g., U.S. Pat. No. 6,699,843).

[0239] Aptamers may comprise any deoxyribonucleotide or ribonucleotide or modifications of these bases, such as deoxythiophosphosphate (or phosphorothioate), which have sulfur in place of oxygen as one of the non-bridging ligands bound to the phosphorus. Monothiophosphates αS have one sulfur atom and are thus chiral around the phosphorus center. Dithiophosphates are substituted at both oxygens and are thus achiral. Phosphorothioate nucleotides are commercially available or can be synthesized by several different methods known in the art.

Antibodies and Antigen-Binding Fragments

[0240] Provided herein are antibodies that specifically bind to LAR, RPTP-δ, or to RPTP-σ; antibodies that specifically bind to LAR and RPTP-δ; antibodies that specifically bind to LAR and RPTP-σ; antibodies that specifically bind to RPTP-δ and RPTP-σ; and antibodies that specifically bind to LAR, RPTP-δ, and RPTP-σ, and methods of making and using these antibodies. These specific antibodies may be polyclonal or monoclonal, prepared by immunization of animals and subsequent isolation of the antibody, or the antibodies may be recombinant antibodies. The antibodies described herein are useful for affecting the immunoresponsiveness of an immune cell that expresses at least one of LAR, RPTP-δ, and RPTP-σ. In certain embodiments, the antibodies suppress the immunoresponsiveness of an immune cell that expresses at least one of LAR, RPTP-δ, and RPTP-σ. Such antibodies include those that exhibit a similar effect on the immune cell as the poxvirus protein A41L or 130L. These antibodies are capable of competitively inhibiting binding and/or impairing (i.e., preventing, blocking, decreasing) binding of A41L (or alternatively, 130L) to an immune cell. In one embodiment, an antibody or antigen-binding fragment thereof specifically binds to at least two RPTPs, which may be any two of LAR, RPTP-δ, and RPTP-σ, and competitively inhibits binding of A41L (or 130L) to the at least two RPTP polypeptides. In another embodiment, such an antibody inhibits binding of A41L (or 130L) to an immune cell that expresses any one of LAR, RPTP-δ, and RPTP-σ. Thus, the antibody or antigen-binding fragment thereof suppresses the immunoresponsiveness of the immune cell, which expresses any one of LAR, RPTP-δ, and RPTP-σ. In a particular embodiment, an antibody, or antigen-binding fragment thereof, specifically binds to both RPTP-δ and RPTP-σ and inhibits binding of A41L or 130L to RPTP-δ or to RPTP-σ or to both RPTP-δ and RPTP-σ. In another embodiment, an antibody or antigen-binding fragment thereof specifically binds to all three of LAR, RPTP-δ, and RPTP-σ.

[0241] The antibodies described herein may be useful for treating or preventing, inhibiting, slowing the progression of, or reducing the symptoms associated with, an immunological disease or disorder, a cardiovascular disease or disorder, a metabolic disease or disorder, or a proliferative disease or disorder. An immunological disorder includes an inflammatory disease or disorder and an autoimmune disease or disorder. While inflammation or an inflammatory response is a host's normal and protective response to an injury, inflammation can cause undesired damage. For example, atherosclerosis is, at least in part, a pathological response to arterial injury and the consequent inflammatory cascade. Examples of immunological disorders that may be treated with an antibody or antigen-binding fragment thereof described herein include but are not limited to multiple sclerosis, rheumatoid arthritis, systemic lupus erythematosus (SLE), graft versus host disease (GVHD), sepsis, diabetes, psoriasis, atherosclerosis, Sjogren's syndrome, progressive systemic sclerosis, scleroderma, acute coronary syndrome, ischemic reperfusion, Crohn's Disease, endometriosis, glomerulonephritis, myasthenia gravis, idiopathic pulmonary fibrosis, asthma, acute respiratory distress syndrome (ARDS), vasculitis, or inflammatory autoimmune myositis and other inflammatory and muscle degenerative diseases (e.g., dermatomyositis, polymyositis, juvenile dermatomyositis, inclusion body myositis). A cardiovascular disease or disorder that may be treated, which may include a disease and disorder that is also considered an immunological disease/disorder, includes for example, atherosclerosis, endocarditis, hypertension, or peripheral ischemic disease. A metabolic disease or disorder includes diabetes, obesity, and diseases and disorders associated with abnormal or altered mitochondrial function.

[0242] Any one or more of the RPTPs described herein may also be used in methods for screening samples containing antibodies, for example, samples of purified antibodies, antisera, or cell culture supernatants, or any other biological sample that may contain one or more antibodies specific for one or more of the RPTPs. One or more of the RPTPs may also be used in methods for identifying and selecting from a biological sample one or more B cells that are producing an antibody that specifically binds to the one or more of the RPTPs (e.g., plaque forming assays and the like). The B cells may then be used as source of the specific antibody-encoding polynucleotide that can be cloned and/or modified by recombinant molecular biology techniques known in the art and described herein.

[0243] As used herein, an antibody is said to be “immunospecific,” “specific for” or to “specifically bind” one or more of LAR, RPTP-δ and RPTP-σ if it reacts at a detectable level with the one or more RPTPs, preferably with an affinity constant, Kₐ, of greater than or equal to about 10⁴ M⁻¹, or greater than or equal to about 10⁵ M⁻¹, greater than or equal to about 10⁶ M⁻¹, greater than or equal to about or 10⁷ M⁻¹, greater than or equal to 10⁸ M⁻¹. Affinity of an antibody for its cognate antigen is also commonly expressed as a dissociation constant K_{D}, and an anti-RPTP antibody specifically binds to one or more RPTPs if it binds with a K_{D} of less than or equal to 10⁻⁴ M, less than or equal to about 10⁻⁵ M, less than or equal to about 10⁻⁶ M, less than or equal to 10⁻⁷ M, or less than or equal to 10⁻⁸ M.

[0244] Affinities of binding partners or antibodies can be readily determined using conventional techniques, for example, those described by Scatchard et al. (Ann. N.Y. Acad. Sci. USA 51:660 (1949)) and by surface plasmon resonance (SPR; BIAcore™, Biosensor, Piscataway, N.J.). For surface plasmon resonance, target molecules are immobilized on a solid phase and exposed to ligands in a mobile phase running along a flow cell. If ligand binding to the immobilized target occurs, the local refractive index changes, leading to a change in SPR angle, which can be monitored in real time by detecting changes in the intensity of the reflected light. The rates of change of the surface plasmon resonance signal can be analyzed to yield apparent rate constants for the association and dissociation phases of the binding reaction. The ratio of these values gives the apparent equilibrium constant (affinity) (see, e.g., Wolff et al., Cancer Res. 53:2560-2565 (1993)).

[0245] Binding properties of an antibody to an RPTP described herein may generally be determined and assessed using immunodetection methods including, for example, an enzyme-linked immunosorbent assay (ELISA), immunoprecipitation, immunoblotting, countercurrent immunoelectrophoresis, radioimmunoassays, dot blot assays, inhibition or competition assays, and the like, which may be readily performed by those having ordinary skill in the art (see, e.g., U.S. Pat. Nos. 4,376,110 and 4,486,530; Harlow et al., Antibodies: A Laboratory Manual, Cold Spring Harbor Laboratory (1988)). Immunoassay methods may include controls and procedures to determine whether antibodies bind specifically to LAR, RPTP-δ, and/or RPTP-σ and do not recognize or cross-react with other protein tyrosine phosphatases, particularly other receptor-like protein tyrosine phosphatases. In addition, an immunoassay performed for detection of anti-RPTP (i.e., anti-LAR, anti-RPTP-δ, and/or anti-RPTP-σ) antibodies that are produced in response to immunization of a host with an RPTP conjugated to a particular carrier polypeptide may incorporate the use of RPTP that is conjugated to a different carrier polypeptide than that used for immunization to reduce or eliminate detection of antibodies that bind specifically to the immunizing carrier polypeptide. Alternatively, an RPTP described herein that is not conjugated to a carrier molecule may be used in an immunoassay for detecting immunospecific antibodies.

[0246] In certain embodiments, an antibody as described herein is specific for only one of LAR, RPTP-δ, and RPTP-σ. That is, for example, an antibody that specifically binds to LAR does not specifically bind to either RPTP-δ or RPTP-σ; an antibody that specifically binds to RPTP-δ does not specifically bind to LAR or to RPTP-σ; and an antibody that specifically binds to RPTP-σ does not specifically bind to LAR or to RPTP-δ. Such antibodies that specifically bind to only one RPTP described herein bind to an epitope (antigenic determinant) that comprises an amino acid sequence of the RPTP that is not identical or similar to an amino acid sequence present in another RPTP, or such antibodies specifically bind to a conformational epitope that is present in only the RPTP to which the antibody specifically binds. The specificity of an antibody for a particular RPTP may be readily determined using any of the various immunoassays available in the art and described herein.

[0247] In other embodiments, an antibody or antigen-binding fragment thereof specifically binds to at least two of LAR, RPTP-δ, and RPTP-σ (i.e., LAR and RPTP-δ; LAR and RPTP-σ, or RPTP-δ and RPTP-σ), and in other embodiments, an antibody or antigen-binding fragment thereof specifically binds to all three RPTPs described herein. An antibody that specifically binds to LAR, RPTP-δ, and RPTP-σ recognizes an epitope (antigenic determinant) that is commonly present in each of the RPTPs. An antigenic determinant or epitope that is common to at least two of LAR, RPTP-δ, and RPTP-σ may comprise an amino acid sequence that is identical or similar in each of the at least two RPTPs, or may comprise a conformational epitope common to at least two of the RPTPs, or may comprise a similar chemical structure, for example, a chemical structure that results from distribution of surface charge(s) of the amino acids that are included in the epitope. By way of example, the amino acid sequence set forth in SEQ ID NO:54 (YSAPANLYV) is common to each of LAR, RPTP-δ, and RPTP-σ. An antibody that binds to an epitope that comprises this amino acid sequence located in the second immunoglobulin-like domain of each RPTP would therefore specifically bind to each of LAR, RPTP-δ, and RPTP-σ.

[0248] Antibodies may generally be prepared by any of a variety of techniques known to persons having ordinary skill in the art. See, e.g., Harlow et al., Antibodies: A Laboratory Manual, Cold Spring Harbor Laboratory (1988); Peterson, ILAR J. 46:314-19 (2005)). Any one of the RPTPs described herein, or peptides or fragments thereof, or a cell expressing one or more of the RPTPs may be used as an immunogen for immunizing an animal for production of either polyclonal antibodies or monoclonal antibodies. Fragments of each RPTP that may be used as an immunogen may include larger fragments, such as the extracellular region (which includes the three immunoglobulin (Ig) domains and the fibronectin domains) and the intracellular region (which includes the two phosphatase catalytic domains D1 and D2), or smaller fragments thereof.

[0249] An immunogen may comprise a portion of the extracellular region, such as at least one of the Ig domains or a portion thereof or at least one of the fibronectin domains or a portion thereof. RPTP peptide and polypeptide immunogens may be used to generate and/or identify antibodies or antigen-binding fragments thereof that are capable of altering (increasing or decreasing in a statistically significant or biological significant manner, preferably decreasing) the immunoresponsiveness of an immune cell. Exemplary peptide immunogens may comprise 6, 7, 8, 9, 10, 11, 12, 20-25, 21-50, 26-30, 31-40, 41-50, 51-60, 61-70, or 71-75 consecutive amino acids of LAR, RPTP-δ, or RPTP-σ as provided herein (or of a variant thereof). For example, peptides derived from the Ig domains, such as SEQ ID NO:53 (SGALQIEQSEESDQGK); SEQ ID NO:54 (YSAPANLYV); SEQ ID NO:55 (WMLGAEDLTPEDDMPIGR); and SEQ ID NO:56 (NVLELNDVR) of RPTP-δ may be used as immunogens. Examples of peptides derived from the fibronectin III repeats of RPTP-δ include SEQ ID NO:57 (GPPSEPVLTQTSEQAPSSAPR); SEQ ID NO:58 (SPQGLGASTAEISAR); SEQ ID NO:59 (YTAVDGEDDKPHEILGIPSDTTK); SEQ ID NO:60 (VGFGEEMVK); and SEQ ID NO:61 (GPGPYSPSVQFR). Examples of peptides derived from the fibronectin III repeats of RPTP-σ include SEQ ID NO:45 (SIGQGPPSESVVTR); SEQ ID NO:46 (HNVDDSLLTTVGSLLEDETYVR); SEQ ID NO:47 (VLAFTSVGDGPLSDPIQVK); SEQ ID NO:48 (TEVGPGPESSPVVVR); SEQ ID NO:49 (WEPPAGTAEDQVLGYR); and SEQ ID NO:50 (TSVLLSWEFPDNYNSPTPYK). An antibody that specifically binds to an antigenic determinant (epitope) present in the intracellular portion of an RPTP would not be expected to competitively inhibit binding (or impair binding) of a poxvirus polypeptide such as A41L or 130L to the RPTP because the viral polypeptide likely alters an immune response of an immune cell by binding to the extracellular portion of a cell surface antigen such as LAR, RPTP-δ, and/or RPTP-σ. An antibody that specifically binds to the intracellular portion of an RPTP may be used in combination with an antibody (or other agent) that alters immunoresponsiveness of an immune cell and that competitively inhibits binding of A41L or 130L to at least one RPTP. Accordingly, peptides and fragments comprising amino acid sequences from the intracellular domain, particularly the catalytic domains, either D1 or D2, may also be used as immunogens (for example, SEQ ID NO:51 (TEVGPGPESSPVVVR) of RPTP-σ).

[0250] RPTP peptides and fragments that are useful as immunogens include portions of an RPTP to which A41L or 130L binds. The RPTP domain that interacts with A41L or 130L may be identified by constructing RPTP extracellular domain polypeptides whereby one or more of the extracellular domains is deleted. By way of example, a fusion polypeptide, for example may exclude the fibronectin domains of an RPTP, and thus comprises only one, two, or three RPTP Ig-like domains. Such a RPTP Ig-like domain polypeptide may be fused to an immunoglobulin Fc polypeptide, or mutein thereof, and comprise the first immunoglobulin-like domain of an RPTP, the first and second immunoglobulin-like domains, the first and third immunoglobulin-like domains, the second or third immunoglobulin-like domains, or all three immunoglobulin-like domains fused to an Fc polypeptide. Such RPTP Ig-like domain polypeptides may also be useful for identifying and determining the extent to which a poxvirus polypeptide binds or a cellular ligand binds to an RPTP immunoglobulin-like domain(s).

[0251] One method for determining the amino acid sequence of a poxvirus polypeptide binding site, or a portion of the binding site, of any one of LAR, RPTP-δ, and RPTP-δ, includes peptide mapping techniques. For example, LAR, RPTP-δ, or RPTP-σ peptides may be randomly generated by proteolytic digestion using any one or more of various proteases, the peptides separated and/or isolated (e.g., by gel electrophoresis, column chromatography), followed by determination of which peptide(s) a poxvirus polypeptide, such as A41L or 130L, binds to and then sequence analysis of the peptides. The RPTP peptides may also be generated using recombinant methods described herein and practiced in the art. Peptides randomly generated by recombinant methods may also be used to prepare peptide combinatorial libraries or phage libraries as described herein and in the art. Alternatively, the amino acid sequences of portions of LAR, RPTP-σ, and/or RPTP-δ that interact with a poxvirus polypeptide may be determined by computer modeling of the phosphatase, or of a portion of the phosphatase, for example, the extracellular portion or the Ig domains, and/or x-ray crystallography (which may include preparation and analysis of crystals of the phosphatase only or of the phosphatase-viral polypeptide complex).

[0252] Immunogenic peptides of LAR, RPTP-δ, or RPTP-σ may also be determined by computer analysis of the amino acid sequence of the RPTP to determine a hydrophilicity plot. Portions of the RPTP that are accessible to an antibody are most likely portions of the protein that are in contact with the aqueous environment and are hydrophilic. Regions of hydrophilicity can be determined using computer programs available to persons skilled in the art and which assign a “hydrophilic index” to each amino acid in a protein and then plot a profile.

[0253] Preparation of an immunogen, particularly polypeptide fragments or peptides, for injection into animals may include covalent coupling of the RPTP fragment or peptide (or variant thereof), to another immunogenic protein, for example, a carrier protein such as keyhole limpet hemocyanin (KLH) or bovine serum albumin (BSA) or the like. A polypeptide or peptide immunogen may include one or more additional amino acids at either the N-terminal or C-terminal end that facilitate the conjugation procedure (e.g., the addition of a cysteine to facilitate conjugation of a peptide to KLH). Other amino acid residues within a polypeptide or peptide may be substituted to prevent conjugation at that particular amino acid position to a carrier polypeptide (e.g., substituting a serine residue for cysteine at internal positions of a polypeptide/peptide) or may be substituted to facilitate solubility or to increase immunogenicity.

[0254] An antibody as contemplated and described herein may belong to any immunoglobulin class, for example IgG, IgE, IgM, IgD, or IgA. It may be obtained from or derived from an animal, for example, fowl (e.g., chicken) and mammals, which include but are not limited to a mouse, rat, hamster, rabbit, or other rodent, a cow, horse, sheep, goat, camel, human, or other primate. The antibody may be an internalising antibody. In one such technique, an animal is immunized with an RPTP or fragment thereof as described herein as an antigen to generate polyclonal antisera. Suitable animals include, for example, rabbits, sheep, goats, pigs, cattle, and may also include smaller mammalian species, such as mice, rats, and hamsters, or other species.

[0255] Polyclonal antibodies that bind specifically to LAR, RPTP-δ, and/or RPTP-σ can be prepared using methods described herein and practiced by persons skilled in the art (see, for example, Green et al., “Production of Polyclonal Antisera,” in Immunochemical Protocols (Manson, ed.), pages 1-5 (Humana Press 1992); Harlow et al., Antibodies: A Laboratory Manual, Cold Spring Harbor Laboratory (1988); Williams et al., “Expression of foreign proteins in E. coli using plasmid vectors and purification of specific polyclonal antibodies,” in DNA Cloning 2: Expression Systems, 2nd Edition, Glover et al. (eds.), page 15 (Oxford University Press 1995)). Although polyclonal antibodies are typically raised in animals such as rats, mice, rabbits, goats, cattle, or sheep, an anti-RPTP antibody may also be obtained from a subhuman primate. General techniques for raising diagnostically and therapeutically useful antibodies in baboons may be found, for example, in International Patent Application Publication No. WO 91/11465 (1991) and in Losman et al., Int. J. Cancer 46:310, 1990.

[0256] In addition, the LAR, RPTP-δ, and/or RPTP-σ polypeptide, fragment or peptide thereof, or a cell expressing one or more of these RPTPs used as an immunogen may be emulsified in an adjuvant. See, e.g, Harlow et al., Antibodies: A Laboratory Manual, Cold Spring Harbor Laboratory (1988). Adjuvants typically used for immunization of non-human animals include but are not limited to Freund's complete adjuvant, Freund's incomplete adjuvant, montanide ISA, Ribi Adjuvant System (RAS) (Corixa Corporation, Seattle, Wash.), and nitrocellulose-adsorbed antigen. The immunogen may be injected into the animal via any number of different routes, including intraperitoneally, intravenously, intramuscularly, intradermally, intraocularly, or subcutaneously. In general, after the first injection, animals receive one or more booster immunizations according to a preferred schedule that may vary according to, inter alia, the antigen, the adjuvant (if any) and/or the particular animal species. The immune response may be monitored by periodically bleeding the animal, separating the sera from the collected blood, and analyzing the sera in an immunoassay, such as an ELISA or Ouchterlony diffusion assay, or the like, to determine the specific antibody titer. Once an adequate antibody titer is established, the animals may be bled periodically to accumulate the polyclonal antisera. Polyclonal antibodies that bind specifically to LAR, RPTP-δ, and/or RPTP-σ may then be purified from such antisera, for example, by affinity chromatography using protein A or protein G immobilized on a suitable solid support (see, e.g., Coligan, supra, p. 2.7.1-2.7.12; 2.9.1-2.9.3; Baines et al., Purification of Immunoglobulin G (IgG), in Methods in Molecular Biology, 10:9-104 (The Humana Press, Inc. (1992)). Alternatively, affinity chromatography may be performed wherein an RPTP or an antibody specific for an Ig constant region of the particular immunized animal species is immobilized on a suitable solid support.

[0257] Monoclonal antibodies that specifically bind to LAR, RPTP-δ, and/or RPTP-σ and hybridomas, which are examples of immortal eukaryotic cell lines, that produce monoclonal antibodies having the desired binding specificity, may also be prepared, for example, using the technique of Kohler and Milstein (Nature, 256:495-97 (1976), Eur. J. Immunol. 6:511-19 (1975)) and improvements thereto (see, e.g., Coligan et al. (eds.), Current Protocols in Immunology, 1:2.5.1-2.6.7 (John Wiley & Sons 1991); U.S. Pat. Nos. 4,902,614, 4,543,439, and 4,411,993; Monoclonal Antibodies, Hybridomas: A New Dimension in Biological Analyses, Plenum Press, Kennett et al. (eds.) (1980); and Antibodies: A Laboratory Manual, Harlow and Lane (eds.), Cold Spring Harbor Laboratory Press (1988); see also, e.g., Brand et al., Planta Med. 70:986-92 (2004); Pasqualini et al., Proc. Natl. Acad. Sci. USA 101:257-59 (2004)). An animal, for example, a rat, hamster, or more commonly, a mouse, is immunized with a RPTP immunogen prepared as described above. The presence of specific antibody production may be monitored after the initial injection (injections may be administered by any one of several routes as described herein for generation of polyclonal antibodies) and/or after a booster injection by obtaining a serum sample and detecting the presence of an antibody that binds to LAR, RPTP-δ, and/or RPTP-σ using any one of several immunodetection methods known in the art and described herein.

[0258] From animals producing antibodies that bind to LAR, RPTP-δ, and/or RPTP-σ, lymphoid cells, most commonly cells from the spleen or lymph node, are removed to obtain B-lymphocytes, which are lymphoid cells that are antibody-forming cells. The lymphoid cells, typically spleen cells, may be immortalized by fusion with a drug-sensitized myeloma (e.g., plasmacytoma) cell fusion partner, preferably one that is syngeneic with the immunized animal and that optionally has other desirable properties (e.g., inability to express endogenous Ig gene products, e.g., P3X 63-Ag 8.653 (ATCC No. CRL 1580); NS0, SP20)). The lymphoid cells and the myeloma cells may be combined for a few minutes with a membrane fusion-promoting agent, such as polyethylene glycol or a nonionic detergent, and then plated at low density on a selective medium that supports the growth of hybridoma cells, but not unfused myeloma cells. A preferred selection media is HAT (hypoxanthine, aminopterin, thymidine). After a sufficient time, usually about one to two weeks, colonies of cells are observed. Antibodies produced by the cells may be tested for binding activity to LAR, RPTP-δ, and/or RPTP-σ. The hybridomas are cloned (e.g., by limited dilution cloning or by soft agar plaque isolation) and positive clones that produce an antibody specific to the antigen are selected and cultured. Hybridomas producing monoclonal antibodies with high affinity and specificity for LAR, RPTP-δ, and/or RPTP-σ are preferred.

[0259] Monoclonal antibodies may be isolated from the supernatants of hybridoma cultures. An alternative method for production of a murine monoclonal antibody is to inject the hybridoma cells into the peritoneal cavity of a syngeneic mouse, for example, a mouse that has been treated (e.g., pristane-primed) to promote formation of ascites fluid containing the monoclonal antibody. Contaminants may be removed from the subsequently harvested ascites fluid (usually within 1-3 weeks) by conventional techniques, such as chromatography (e.g., size-exclusion, ion-exchange), gel filtration, precipitation, extraction, or the like (see, e.g., Coligan, supra, p. 2.7.1-2.7.12; 2.9.1-2.9.3; Baines et al., Purification of Immunoglobulin G (IgG), in Methods in Molecular Biology, 10:9-104 (The Humana Press, Inc. (1992)). For example, antibodies may be purified by affinity chromatography using an appropriate ligand selected based on particular properties of the monoclonal antibody (e.g., heavy or light chain isotype, binding specificity, etc.). Examples of a suitable ligand, immobilized on a solid support, include Protein A, Protein G, an anti-constant region (light chain or heavy chain) antibody, an anti-idiotype antibody, an LAR, RPTP-δ, and/or RPTP-σ or fragment thereof.

[0260] An antibody that specifically binds to LAR, RPTP-δ, and/or RPTP-σ may be a human monoclonal antibody. Human monoclonal antibodies may be generated by any number of techniques with which those having ordinary skill in the art will be familiar. Such methods include, but are not limited to, Epstein Barr Virus (EBV) transformation of human peripheral blood cells (e.g., containing B lymphocytes), in vitro immunization of human B cells, fusion of spleen cells from immunized transgenic mice carrying inserted human immunoglobulin genes, isolation from human immunoglobulin V region phage libraries, or other procedures as known in the art and based on the disclosure herein.

[0261] For example, human monoclonal antibodies may be obtained from transgenic mice that have been engineered to produce specific human antibodies in response to antigenic challenge. Methods for obtaining human antibodies from transgenic mice are described, for example, by Green et al., Nature Genet. 7:13 (1994); Lonberg et al., Nature 368:856 (1994); Taylor et al., Int. Immun. 6:579 (1994); U.S. Pat. No. 5,877,397; Bruggemann et al., Curr. Opin. Biotechnol. 8:455-58 (1997); Jakobovits et al., Ann. N.Y. Acad. Sci. 764:525-35 (1995). In this technique, elements of the human heavy and light chain locus are artificially introduced by genetic engineering into strains of mice derived from embryonic stem cell lines that contain targeted disruptions of the endogenous murine heavy chain and light chain loci. (See also Bruggemann et al., Curr. Opin. Biotechnol. 8:455-58 (1997)). For example, human immunoglobulin transgenes may be mini-gene constructs, or transloci on yeast artificial chromosomes, which undergo B cell-specific DNA rearrangement and hypermutation in the mouse lymphoid tissue. Human monoclonal antibodies may be obtained by immunizing the transgenic mice, which may then produce human antibodies specific for the antigen. Lymphoid cells of the immunized transgenic mice can be used to produce human antibody-secreting hybridomas according to the methods described herein. Polyclonal sera containing human antibodies may also be obtained from the blood of the immunized animals.

[0262] Another method for generating human antigen specific monoclonal antibodies includes immortalizing human peripheral blood cells by EBV transformation. See, e.g., U.S. Pat. No. 4,464,456. Such an immortalized B cell line (or lymphoblastoid cell line) producing a monoclonal antibody that specifically binds to LAR, RPTP-δ, and/or RPTP-σ can be identified by immunodetection methods as provided herein, for example, an ELISA, and then isolated by standard cloning techniques. The stability of the lymphoblastoid cell line producing an anti- LAR, RPTP-δ, and/or RPTP-σ antibody may be improved by fusing the transformed cell line with a murine myeloma to produce a mouse-human hybrid cell line according to methods known in the art (see, e.g., Glasky et al., Hybridoma 8:377-89 (1989)). Still another method to generate human monoclonal antibodies is in vitro immunization, which includes priming human splenic B cells with antigen, followed by fusion of primed B cells with a heterohybrid fusion partner. See, e.g., Boerner et Al., J. Immunol. 14 7:86-95 (1991).

[0263] In certain embodiments, a B cell that is producing an anti-RPTP antibody is selected, and the light chain and heavy chain variable regions are cloned from the B cell according to molecular biology techniques known in the art (WO 92/02551; U.S. Pat. No. 5,627,052; Babcook et al., Proc. Natl. Acad. Sci. USA 93:7843-48 (1996)) and described herein. B cells from an immunized animal are isolated from the spleen, lymph node, or peripheral blood sample by selecting a cell that is producing an antibody that specifically binds to LAR, RPTP-δ, and/or RPTP-σ. B cells may also be isolated from humans, for example, from a peripheral blood sample. Methods for detecting single B cells that are producing an antibody with the desired specificity are well known in the art, for example, by plaque formation, fluorescence-activated cell sorting, in vitro stimulation followed by detection of specific antibody, and the like. Methods for selection of specific antibody producing B cells include, for example, preparing a single cell suspension of B cells in soft agar that contains LAR, RPTP-δ, and/or RPTP-σ or a fragment thereof. Binding of the specific antibody produced by the B cell to the antigen results in the formation of a complex, which may be visible as an immunoprecipitate. After the B cells producing the specific antibody are selected, the specific antibody genes may be cloned by isolating and amplifying DNA or mRNA according to methods known in the art and described herein.

[0264] Chimeric antibodies, specific for LAR, RPTP-δ, and/or RPTP-σ, including humanized antibodies, may also be generated. A chimeric antibody has at least one constant region domain derived from a first mammalian species and at least one variable region domain derived from a second, distinct mammalian species. See, e.g., Morrison et al., Proc. Natl. Acad. Sci. USA, 81:6851-55 (1984). In one embodiment, a chimeric antibody may be constructed by cloning the polynucleotide sequence that encodes at least one variable region domain derived from a non-human monoclonal antibody, such as the variable region derived from a murine, rat, or hamster monoclonal antibody, into a vector containing a nucleic acid sequence that encodes at least one human constant region (see, e.g., Shin et al., Methods Enzymol. 178:459-76 (1989); Walls et al., Nucleic Acids Res. 21:2921-29 (1993)). By way of example, the polynucleotide sequence encoding the light chain variable region of a murine monoclonal antibody may be inserted into a vector containing a nucleic acid sequence encoding the human kappa light chain constant region sequence. In a separate vector, the polynucleotide sequence encoding the heavy chain variable region of the monoclonal antibody may be cloned in frame with sequences encoding the human IgG1 constant region. The particular human constant region selected may depend upon the effector functions desired for the particular antibody (e.g., complement fixing, binding to a particular Fc receptor, etc.). Another method known in the art for generating chimeric antibodies is homologous recombination (e.g., U.S. Pat. No. 5,482,856). Preferably, the vectors will be transfected into eukaryotic cells for stable expression of the chimeric antibody.

[0265] A non-human/human chimeric antibody may be further genetically engineered to create a “humanized” antibody. Such a humanized antibody may comprise a plurality of CDRs derived from an immunoglobulin of a non-human mammalian species, at least one human variable framework region, and at least one human immunoglobulin constant region. Humanization may in certain embodiments provide an antibody that has decreased binding affinity for LAR, RPTP-δ, and/or RPTP-σ when compared, for example, with either a non-human monoclonal antibody from which an LAR, RPTP-δ, and/or RPTP-σ binding variable region is obtained, or a chimeric antibody having such a V region and at least one human C region, as described above. Useful strategies for designing humanized antibodies may therefore include, for example by way of illustration and not limitation, identification of human variable framework regions that are most homologous to the non-human framework regions of the chimeric antibody. Without wishing to be bound by theory, such a strategy may increase the likelihood that the humanized antibody will retain specific binding affinity for LAR, RPTP-δ, and/or RPTP-σ, which in some preferred embodiments may be substantially the same affinity for LAR, RPTP-δ, and/or RPTP-σ, and in certain other embodiments may be a greater affinity for LAR, RPTP-δ, and/or RPTP-94 (see, e.g., Jones et al., Nature 321:522-25 (1986); Riechmann et al., Nature 332:323-27 (1988)).

[0266] Designing a humanized antibody may therefore include determining CDR loop conformations and structural determinants of the non-human variable regions, for example, by computer modeling, and then comparing the CDR loops and determinants to known human CDR loop structures and determinants (see, e.g., Padlan et al., FASEB 9:133-39 (1995); Chothia et al., Nature, 342:377-83 (1989)). Computer modeling may also be used to compare human structural templates selected by sequence homology with the non-human variable regions (see, e.g., Bajorath et al., Ther. Immunol. 2:95-103 (1995); EP-0578515-A3). If humanization of the non-human CDRs results in a decrease in binding affinity, computer modeling may aid in identifying specific amino acid residues that could be changed by site-directed or other mutagenesis techniques to partially, completely, or supra-optimally (i.e., increase to a level greater than that of the non-humanized antibody) restore affinity. Those having ordinary skill in the art are familiar with these techniques and will readily appreciate numerous variations and modifications to such design strategies.

[0267] One such method for preparing a humanized antibody is called veneering. Veneering framework (FR) residues refers to the selective replacement of FR residues from, e.g., a rodent heavy or light chain V region, with human FR residues in order to provide a xenogeneic molecule comprising an antigen-binding site that retains substantially all of the native FR polypeptide folding structure. Veneering techniques are based on the understanding that the ligand binding characteristics of an antigen-binding site are determined primarily by the structure and relative disposition of the heavy and light chain CDR sets within the antigen-binding surface (see, e.g., Davies et al., Ann. Rev. Biochem. 59:439-73, (1990)). Thus, antigen binding specificity can be preserved in a humanized antibody when the CDR structures, their interaction with each other, and their interaction with the rest of the V region domains are carefully maintained. By using veneering techniques, exterior (e.g., solvent-accessible) FR residues that are readily encountered by the immune system are selectively replaced with human residues to provide a hybrid molecule that comprises either a weakly immunogenic, or substantially non-immunogenic veneered surface.

[0268] The process of veneering makes use of the available sequence data for human antibody variable domains compiled by Kabat et al., in Sequences of Proteins of Immunological Interest, 4th ed., (U.S. Dept. of Health and Human Services, U.S. Government Printing Office, 1991), updates to the Kabat database, and other accessible U.S. and foreign databases (both nucleic acid and protein). Solvent accessibilities of V region amino acids can be deduced from the known three-dimensional structure for human and murine antibody fragments. Initially, the FR amino acid sequence of the variable domains of an antibody molecule of interest are compared with corresponding FR sequences of human variable domains obtained from the above-identified databases and publications. The most homologous human V regions are then compared residue by residue to corresponding murine amino acids. The residues in the murine FR that differ from the human counterpart are replaced by the residues present in the human moiety using recombinant techniques well known in the art. Residue switching is only carried out with moieties that are at least partially exposed (solvent accessible), and care is exercised in the replacement of amino acid residues that may have a significant effect on the tertiary structure of V region domains, such as proline, glycine, and charged amino acids.

[0269] In this manner, the resultant “veneered” antigen-binding sites are designed to retain the rodent CDR residues, the residues substantially adjacent to the CDRs, the residues identified as buried or mostly buried (solvent inaccessible), the residues believed to participate in non-covalent (e.g., electrostatic and hydrophobic) contacts between heavy and light chain domains, and the residues from conserved structural regions of the FRs that are believed to influence the “canonical” tertiary structures of the CDR loops (see, e.g., Chothia et al., Nature, 342:377-383 (1989)). These design criteria are then used to prepare recombinant nucleotide sequences that combine the CDRs of both the heavy and light chain of a antigen-binding site into human-appearing FRs that can be used to transfect mammalian cells for the expression of recombinant human antibodies that exhibit the antigen specificity of the rodent antibody molecule.

[0270] For particular uses, antigen-binding fragments of antibodies may be desired. Antibody fragments, F(ab′)₂, Fab, Fab′, Fv, and Fd, can be obtained, for example, by proteolytic hydrolysis of the antibody, for example, pepsin or papain digestion of whole antibodies according to conventional methods. As an illustration, antibody fragments can be produced by enzymatic cleavage of antibodies with pepsin to provide a fragment denoted F(ab′)₂. This fragment can be further cleaved using a thiol reducing agent to produce an Fab′ monovalent fragment. Optionally, the cleavage reaction can be performed using a blocking group for the sulfhydryl groups that result from cleavage of disulfide linkages. As an alternative, an enzymatic cleavage of an antibody using papain produces two monovalent Fab fragments and an Fc fragment (see, e.g., U.S. Pat. No. 4,331,647; Nisonoffet al., Arch. Biochem. Biophys. 89:230 (1960); Porter, Biochem. J. 73:119 (1959); Edelman et al., in Methods in Enzymology 1:422 (Academic Press 1967); Weir, Handbook of Experimental Immunology, Blackwell Scientific, Boston (1986)). The antigen binding fragments may be separated from the Fc fragments by affinity chromatography, for example, using immobilized protein A, protein G, an Fc specific antibody, or immobilized RPTP polypeptide or a fragment thereof. Other methods for cleaving antibodies, such as separating heavy chains to form monovalent light-heavy chain fragments (Fd), further cleaving of fragments, or other enzymatic, chemical, or genetic techniques may also be used, so long as the fragments bind to the RPTP that is recognized by the intact antibody.

[0271] An antibody fragment may also be any synthetic or genetically engineered protein that acts like an antibody in that it binds to a specific antigen to form a complex. For example, antibody fragments include isolated fragments consisting of the light chain variable region, Fv fragments consisting of the variable regions of the heavy and light chains, recombinant single chain polypeptide molecules in which light and heavy variable regions are connected by a peptide linker (scFv proteins), and minimal recognition units consisting of the amino acid residues that mimic the hypervariable region. The antibody comprises at least one variable region domain. The variable region domain may be of any size or amino acid composition and will generally comprise at least one hypervariable amino acid sequence responsible for antigen binding and which is adjacent to or in frame with one or more framework sequences. In general terms, the variable (V) region domain may be any suitable arrangement of immunoglobulin heavy (V_{H}) and/or light (V_{L}) chain variable domains. Thus, for example, the V region domain may be monomeric and be a V_{H} or V_{L} domain, which is capable of independently binding antigen with acceptable affinity. Alternatively, the V region domain may be dimeric and contain V_{H}-V_{H}, V_{H}-V_{L}, or V_{L}-V_{L}, dimers. Preferably, the V region dimer comprises at least one V_{H} and at least one V_{L} chain that are non-covalently associated (hereinafter referred to as Fᵥ). If desired, the chains may be covalently coupled either directly, for example via a disulfide bond between the two variable domains, or through a linker, for example a peptide linker, to form a single chain Fv (scFᵥ).

[0272] A minimal recognition unit is an antibody fragment comprising a single complementarity-determining region (CDR). Such CDR peptides can be obtained by constructing polynucleotides that encode the CDR of an antibody of interest. The polynucleotides are prepared, for example, by using the polymerase chain reaction to synthesize the variable region using mRNA isolated from or contained within antibody-producing cells as a template according to methods practiced by persons skilled in the art (see, for example, Larrick et al., Methods: A Companion to Methods in Enzymology 2:106, (1991); Courtenay-Luck, “Genetic Manipulation of Monoclonal Antibodies,” in Monoclonal Antibodies: Production, Engineering and Clinical Application, Ritter et al. (eds.), page 166 (Cambridge University Press 1995); and Ward et al., “Genetic Manipulation and Expression of Antibodies,” in Monoclonal Antibodies: Principles and Applications, Birch et al., (eds.), page 137 (Wiley-Liss, Inc. 1995)). Alternatively, such CDR peptides and other antibody fragment can be synthesized using an automated peptide synthesizer.

[0273] According to certain embodiments, non-human, human, or humanized heavy chain and light chain variable regions of any of the Ig molecules described herein may be constructed as scFv polypeptide fragments (single chain antibodies). See, e.g., Bird et al., Science 242:423-426 (1988); Huston et al., Proc. Natl. Acad. Sci. USA 85:5879-83 (1988)). Multi-functional scFv fusion proteins may be generated by linking a polynucleotide sequence encoding an scFv polypeptide in-frame with at least one polynucleotide sequence encoding any of a variety of known effector proteins. These methods are known in the art, and are disclosed, for example, in EP-B 1-0318554, U.S. Pat. No. 5,132,405, U.S. Pat. No. 5,091,513, and U.S. Pat. No. 5,476,786. By way of example, effector proteins may include immunoglobulin constant region sequences. See, e.g., Hollenbaugh et al., J. Immunol. Methods 188:1-7 (1995). Other examples of effector proteins are enzymes. As a non-limiting example, such an enzyme may provide a biological activity for therapeutic purposes (see, e.g., Siemers et al., Bioconjug. Chem. 8:510-19 (1997)), or may provide a detectable activity, such as horseradish peroxidase-catalyzed conversion of any of a number of well-known substrates into a detectable product, for diagnostic uses.

[0274] The scFv may, in certain embodiments, be fused to peptide or polypeptide domains that permit detection of specific binding between the fusion protein and antigen (e.g., one or more of the RPTPs described herein). For example, the fusion polypeptide domain may be an affinity tag polypeptide. Binding of the scFv fusion protein to a binding partner (e.g., one or more of the RPTPs or fragment thereof described herein) may therefore be detected using an affinity polypeptide or peptide tag, such as an avidin, streptavidin or a His (e.g., polyhistidine) tag, by any of a variety of techniques with which those skilled in the art will be familiar. Detection techniques may also include, for example, binding of an avidin or streptavidin fusion protein to biotin or to a biotin mimetic sequence (see, e.g., Luo et al., J. Biotechnol. 65:225 (1998) and references cited therein), direct covalent modification of a fusion protein with a detectable moiety (e.g., a labeling moiety), non-covalent binding of the fusion protein to a specific labeled reporter molecule, enzymatic modification of a detectable substrate by a fusion protein that includes a portion having enzyme activity, or immobilization (covalent or non-covalent) of the fusion protein on a solid-phase support. An scFv fusion protein comprising an RPTP-specific immunoglobulin-derived polypeptide may be fused to another polypeptide such as an effector peptide having desirable affinity properties (see, e.g., U.S. Pat. No. 5,100,788; WO 89/03422; U.S. Pat. No. 5,489,528; U.S. Pat. No. 5,672,691; WO 93/24631; U.S. Pat. No. 5,168,049; U.S. Pat. No. 5,272,254; EP 511,747). As provided herein, scFv polypeptide sequences may be fused to fusion polypeptide sequences, including effector protein sequences, that may include full-length fusion polypeptides and that may alternatively contain variants or fragments thereof.

[0275] Antibodies may also be identified and isolated from human immunoglobulin phage libraries, from rabbit immunoglobulin phage libraries, from mouse immunoglobulin phage libraries, and/or from chicken immunoglobulin phage libraries (see, e.g., Winter et al., Annu. Rev. Immunol. 12:433-55 (1994); Burton et al., Adv. Immunol. 57:191-280 (1994); U.S. Pat. No. 5,223,409; Huse et al., Science 246:1275-81 (1989); Schlebusch et al., Hybridoma 16:47-52 (1997) and references cited therein; Rader et al., J. Biol. Chem. 275:13668-76 (2000); Popkov et al., J. Mol. Biol. 325:325-35 (2003); Andris-Widhopf et al., J. Immunol. Methods 242:159-31 (2000)). Antibodies isolated from non-human species or non-human immunoglobulin libraries may be genetically engineered according to methods described herein and known in the art to “humanize” the antibody or fragment thereof. Immunoglobulin variable region gene combinatorial libraries may be created in phage vectors that can be screened to select Ig fragments (Fab, Fv, scFv, or multimers thereof) that bind specifically to an RPTP described herein (see, e.g., U.S. Pat. No. 5,223,409; Huse et al., Science 246:1275-81 (1989); Sastry et al., Proc. Natl. Acad. Sci. USA 86:5728-32 (1989); Alting-Mees et al., Strategies in Molecular Biology 3:1-9 (1990); Kang et al., Proc. Natl. Acad. Sci. USA 88:4363-66 (1991); Hoogenboom et al., J. Molec. Biol. 227:381-388 (1992); Schlebusch et al., Hybridoma 16:47-52 (1997) and references cited therein; U.S. Pat. No. 6,703,015).

[0276] For example, a library containing a plurality of polynucleotide sequences encoding Ig variable region fragments may be inserted into the genome of a filamentous bacteriophage, such as M13 or a variant thereof, in frame with the sequence encoding a phage coat protein such as gene III or gene VIII. A fusion protein may be a fusion of the coat protein with the light chain variable region domain and/or with the heavy chain variable region domain. According to certain embodiments, immunoglobulin Fab fragments may also be displayed on a phage particle (see, e.g., U.S. Pat. No. 5,698,426).

[0277] Heavy and light chain immunoglobulin cDNA expression libraries may also be prepared in lambda phage, for example, using λImmunoZap™(H) and ™ImmunoZap™(L) vectors (Stratagene, La Jolla, Calif.). Briefly, mRNA is isolated from a B cell population and used to create heavy and light chain immunoglobulin cDNA expression libraries in the λImmunoZap(H) and λImmunoZap(L) vectors. These vectors may be screened individually or co-expressed to form Fab fragments or antibodies (see Huse et al., supra; see also Sastry et al., supra). Positive plaques may subsequently be converted to a non-lytic plasmid that allows high-level expression of monoclonal antibody fragments from E. coli.

[0278] Phage that display an Ig fragment (e.g., an Ig V-region or Fab) that binds to LAR, RPTP-δ, and/or RPTP-σ may be selected by mixing the phage library with LAR, RPTP-δ, and/or RPTP-σ or a fragment thereof, or by contacting the phage library with such polypeptide or peptide molecules immobilized on a solid matrix under conditions and for a time sufficient to allow binding. Unbound phage are removed by a wash, and specifically bound phage (i.e., phage that contain an RPTP specific Ig fragment) are then eluted (see, e.g., Messmer et al., Biotechniques 30:798-802 (2001)). Eluted phage may be propagated in an appropriate bacterial host, and generally, successive rounds of RPTP binding and elution can be repeated to increase the yield of phage expressing the RPTP-specific immunoglobulin.

[0279] Phage display techniques may also be used to select Ig fragments or single chain antibodies that bind to LAR, RPTP-δ, and/or RPTP-σ. For examples of suitable vectors having multicloning sites into which candidate nucleic acid molecules (e.g., DNA) encoding such antibody fragments or related peptides may be inserted, see, e.g., McLafferty et al., Gene 128:29-36 (1993); Scott et al., Science 249:386-90 (1990); Smith et al., Meth. Enzymol. 217:228-57 (1993); Fisch et al., Proc. Natl. Acad. Sci. USA 93:7761-66 (1996)). The inserted DNA molecules may comprise randomly generated sequences, or may encode variants of a known peptide or polypeptide domain (such as A41L) that specifically binds to LAR, RPTP-δ, and/or RPTP-σ. Generally, the nucleic acid insert encodes a peptide of up to 60 amino acids, or may encode a peptide of 3 to 35 amino acids, or may encode a peptide of 6 to 20 amino acids. The peptide encoded by the inserted sequence is displayed on the surface of the bacteriophage. Phage expressing a binding domain for the RPTP may be selected on the basis of specific binding to an immobilized RPTP or a fragment thereof. Well-known recombinant genetic techniques may be used to construct fusion proteins containing the fragment. For example, a polypeptide may be generated that comprises a tandem array of two or more similar or dissimilar affinity selected RPTP binding peptide domains, in order to maximize binding affinity for LAR, RPTP-δ, and/or RPTP-σ of the resulting product.

[0280] Combinatorial mutagenesis strategies using phage libraries may also be used for humanizing non-human variable regions (see, e.g., Rosok et al., J. Biol. Chem. 271:22611-18 (1996); Rader et al., Proc. Natl. Acad. Sci. USA 95:8910-15 (1998)). Humanized variable regions that have binding affinity that is minimally reduced or that is comparable to the non-human variable region can be selected, and the nucleotide sequences encoding the humanized variable regions may be determined by standard techniques (see, Sambrook et al., Molecular Cloning: A Laboratory Manual, Cold Spring Harbor Press (2001)). The affinity selected Ig-encoding sequence may then be cloned into another suitable vector for expression of the Ig fragment or, optionally, may be cloned into a vector containing Ig constant regions, for expression of whole immunoglobulin chains.

[0281] Similarly, portions or fragments, such as Fab and Fv fragments, of RPTP specific antibodies may be constructed using conventional enzymatic digestion or recombinant DNA techniques to incorporate the variable regions of a gene that encodes an antibody specific for LAR, RPTP-δ, and/or RPTP-σ. Within one embodiment, in a hybridoma the variable regions of a gene expressing a monoclonal antibody of interest are amplified using nucleotide primers. These primers may be synthesized by one of ordinary skill in the art, or may be purchased from commercially available sources (see, e.g., Stratagene (La Jolla, Calif.), which sells primers for amplifying mouse and human variable regions. The primers may be used to amplify heavy or light chain variable regions, which may then be inserted into vectors such as ImmunoZAP™ H or ImmunoZAP™ L (Stratagene), respectively. These vectors may then be introduced into E. coli, yeast, or mammalian-based systems for expression. Large amounts of a single-chain protein containing a fusion of the V_{H} and V_{L} domains may be produced using these methods (see Bird et al., Science 242:423-426 (1988)). In addition, such techniques may be used to humanize a non-human antibody V region without altering the binding specificity of the antibody.

[0282] In certain other embodiments, RPTP-specific antibodies are multimeric antibody fragments. Useful methodologies are described generally, for example in Hayden et al., Curr Opin. Immunol. 9:201-12 (1997) and Coloma et al., Nat. Biotechnol. 15:159-63 (1997). For example, multimeric antibody fragments may be created by phage techniques to form miniantibodies (U.S. Pat. No. 5,910 573) or diabodies (Holliger et al., Cancer Immunol. Immunother. 45:128-30 (1997)). Multimeric fragments may be generated that are multimers of an RPTP-specific Fv.

[0283] Multimeric antibodies include bispecific and bifunctional antibodies comprising a first Fv specific for an antigen associated with a second Fv having a different antigen specificity (see, e.g., Drakeman et al., Expert Opin. Investig. Drugs 6:1169-78 (1997); Koelemij et al., J. Immunother. 22:514-24 (1999); Marvin et al., Acta Pharmacol. Sin. 26:649-58 (2005); Das et al., Methods Mol. Med. 109:329-46 (2005)). For example, in one embodiment, a bispecific antibody comprises an Fv, or other antigen-binding fragment described herein, that specifically binds to LAR and comprises an Fv, or other antigen-binding fragment, that specifically binds to RPTP-σ. Similarly, in another embodiment, a bispecific antibody comprises an Fv, or other antigen-binding fragment described herein, that specifically binds to LAR and comprises an Fv, or other antigen-binding fragment, that specifically binds to RPTP-δ. In still another embodiment, a bispecific antibody comprises an Fv, or other antigen-binding fragment described herein, that specifically binds to RPTP-σ and comprises an Fv, or other antigen-binding fragment, that specifically binds to RPTP-δ. In other certain embodiments, a multivalent antibody or bispecific antibody comprises an Fv, or other antigen-binding fragment, that specifically binds to at least one of LAR, RPTP-δ, and RPTP-σ, and further comprises an Fv, or other antigen-binding fragment, that is specific for a non-PTP polypeptide, such as for example, a cell surface antigen that when bound by a specific antibody contributes to, facilitates, or is capable of altering (suppressing or enhancing) immunoresponsiveness of an immune cell.

[0284] Introducing amino acid mutations into RPTP-binding immunoglobulin molecules may be useful to increase the specificity or affinity for the RPTP, or to alter an effector function. Immunoglobulins with higher affinity for LAR, RPTP-δ, and/or RPTP-σ may be generated by site-directed mutagenesis of particular residues. Computer assisted three-dimensional molecular modeling may be used to identify the amino acid residues to be changed in order to improve affinity for the RPTP (see, e.g., Mountain et al., Biotechnol. Genet. Eng. Rev. 10:1-142 (1992)). Alternatively, combinatorial libraries of CDRs may be generated in M13 phage and screened for immunoglobulin fragments with improved affinity (see, e.g., Glaser et al., J. Immunol. 149:3903-13 (1992); Barbas et al., Proc. Natl. Acad. Sci. USA 91:3809-13 (1994); U.S. Pat. No. 5,792,456).

[0285] In certain embodiments, the antibody may be genetically engineered to have an altered effector function. For example, the antibody may have an altered capability (increased or decreased in a biologically or statistically significant manner) to mediate complement dependent cytotoxicity (CDC) or antibody dependent cellular cytotoxicity (ADCC) or an altered capability for binding to effector cells via Fc receptors present on the effector cells. Effector functions may be altered by site-directed mutagenesis (see, e.g., Duncan et al., Nature 332:563-64 (1988); Morgan et al., Immunology 86:319-24 (1995); Eghtedarzedeh-Kondri et al., Biotechniques 23:830-34 (1997)). For example, mutation of the glycosylation site on the Fc portion of the immunoglobulin may alter the capability of the immunoglobulin to fix complement (see, e.g., Wright et al., Trends Biotechnol. 15:26-32 (1997)). Other mutations in the constant region domains may alter the ability of the immunoglobulin to fix complement or to effect ADCC (see, e.g., Duncan et al., Nature 332:563-64(1988); Morgan et al., Immunology 86:319-24 (1995); Sensel et al., Mol. Immunol. 34:1019-29 (1997)). (See also, e.g., U.S. Patent Publication Nos. 2003/0118592; 2003/0133939).

[0286] The nucleic acid molecules encoding an antibody or fragment thereof that specifically binds an RPTP, as described herein, may be propagated and expressed according to any of a variety of well-known procedures for nucleic acid excision, ligation, transformation, and transfection. Thus, in certain embodiments expression of an antibody fragment may be preferred in a prokaryotic host cell, such as Escherichia coli (see, e.g., Pluckthun et al., Methods Enzymol. 178:497-515 (1989)). In certain other embodiments, expression of the antibody or an antigen-binding fragment thereof may be preferred in a eukaryotic host cell, including yeast (e.g., Saccharomyces cerevisiae, Schizosaccharomyces pombe, and Pichia pastoris); animal cells (including mammalian cells); or plant cells. Examples of suitable animal cells include, but are not limited to, myeloma, COS, CHO, or hybridoma cells. Examples of plant cells include tobacco, corn, soybean, and rice cells. By methods known to those having ordinary skill in the art and based on the present disclosure, a nucleic acid vector may be designed for expressing foreign sequences in a particular host system, and then polynucleotide sequences encoding the RPTP binding antibody (or fragment thereof) may be inserted. The regulatory elements will vary according to the particular host.

[0287] One or more replicable expression vectors containing a polynucleotide encoding a variable and/or constant region may be prepared and used to transform an appropriate cell line, for example, a non-producing myeloma cell line, such as a mouse NSO line or a bacteria, such as E. coli, in which production of the antibody will occur. In order to obtain efficient transcription and translation, the polynucleotide sequence in each vector should include appropriate regulatory sequences, particularly a promoter and leader sequence operatively linked to the variable domain sequence. Particular methods for producing antibodies in this way are generally well known and routinely used. For example, molecular biology procedures are described by Sambrook et al. (Molecular Cloning, A Laboratory Manual, 2nd ed., Cold Spring Harbor Laboratory, N.Y., 1989; see also Sambrook et al., 3rd ed., Cold Spring Harbor Laboratory, N.Y., (2001)). DNA sequencing can be performed as described in Sanger et al. (Proc. Natl. Acad. Sci. USA 74:5463 (1977)) and the Amersham International plc sequencing handbook and including improvements thereto.

[0288] Site directed mutagenesis of an immunoglobulin variable (V region), framework region, and/or constant region may be performed according to any one of numerous methods described herein and practiced in the art (Kramer et al., Nucleic Acids Res. 12:9441 (1984); Kunkel Proc. Natl. Acad. Sci. USA 82:488-92 (1985); Kunkel et al., Methods Enzymol. 154:367-82 (1987)). Random mutagenesis methods to identify residues that are either important to binding to an RPTP (LAR, RPTP-δ, and/or RPTP-σ) or that do not alter binding of the antigen to the antibody when altered can also be performed according to procedures that are routinely practiced by a person skilled in the art (e.g., alanine scanning mutagenesis; error prone polymerase chain reaction mutagenesis; and oligonucleotide-directed mutagenesis (see, e.g., Sambrook et al. Molecular Cloning: A Laboratory Manual, 3rd ed., Cold Spring Harbor Laboratory Press, N.Y. (2001))). Additionally, numerous publications describe techniques suitable for the preparation of antibodies by manipulation of DNA, creation of expression vectors, and transformation of appropriate cells (Mountain et al., in Biotechnology and Genetic Engineering Reviews (ed. Tombs, M P, 10, Chapter 1, Intercept, Andover, UK (1992)); International Patent Publication No. WO 91/09967).

[0289] The antibodies and antigen-binding fragments thereof that specifically bind to LAR, RPTP-δ, and/or RPTP-σ may also be useful as reagents for immunochemical analyses to detect the presence of one or more of the RPTPs in a biological sample. In certain embodiments, an antibody that specifically binds to at least one of LAR, RPTP-δ, and RPTP-σ may be used to detect expression of the at least one RPTP. In certain particular embodiments, one antibody or a panel of antibodies may be exposed to cells that express an RPTP, and expression of the RPTP may be determined by detection using another RPTP specific antibody that binds to a different epitope than the antibody or antibodies initially permitted to interact with the cells.

[0290] For such a purpose an RPTP-binding immunoglobulin (or fragment thereof) as described herein may contain a detectable moiety or label such as an enzyme, cytotoxic agent, or other reporter molecule, including a dye, radionuclide, luminescent group, fluorescent group, or biotin, or the like. The RPTP-specific immunoglobulin or fragment thereof may be radiolabeled for diagnostic or therapeutic applications. Techniques for radiolabeling of antibodies are known in the art (see, e.g., Adams, In Vivo 12:11-21 (1998); Hiltunen, Acta Oncol. 32:831-9 (1993)). The effector or reporter molecules may be attached to the antibody through any available amino acid side-chain, terminal amino acid, or carbohydrate functional group located in the antibody, provided that the attachment or attachment process does not adversely affect the binding properties such that the usefulness of the molecule is abrogated. Particular functional groups include, for example, any free amino, imino, thiol, hydroxyl, carboxyl, or aldehyde group. Attachment of the antibody or antigen-binding fragment thereof and the effector and/or reporter molecule(s) may be achieved via such groups and an appropriate functional group in the effector or reporter molecule. The linkage may be direct or indirect through spacing or bridging groups (see, e.g. International Patent Application Publication Nos. WO 93/06231, WO 92/22583, WO 90/091195, and WO 89/01476; see also, e.g., commercial vendors such as Pierce Biotechnology, Rockford, Ill.).

[0291] As provided herein and according to methodologies well known in the art, polyclonal and monoclonal antibodies may be used for the affinity isolation of LAR, RPTP-δ, and/or RPTP-σ and fragments thereof (see, e.g., Hermanson et al., Immobilized Affinity Ligand Techniques, Academic Press, Inc. N.Y., (1992)). Briefly, an antibody (or antigen-binding fragment thereof) may be immobilized on a solid support material, which is then contacted with a sample that contains an RPTP. The sample interacts with the immobilized antibody under conditions and for a time that are sufficient to permit binding of the RPTP to the immobilized antibody; non-binding components (that is, those components unrelated to the RPTP) of the sample are removed; and then the RPTP is released from the immobilized antibody using an appropriate eluting solution.

[0292] In certain embodiments, anti-idiotype antibodies that recognize and bind specifically to an antibody (or antigen-binding fragment thereof) that specifically binds to LAR, RPTP-δ, and/or RPTP-σ are provided, and methods for using these anti-idiotype antibodies are also provided. Anti-idiotype antibodies may be generated as polyclonal antibodies or as monoclonal antibodies by the methods described herein, using an anti-LAR, anti-RPTP-δ, or anti-RPTP-σ antibody (or antigen-binding fragment thereof) as immunogen. Anti-idiotype antibodies or fragments thereof may also be generated by any of the recombinant genetic engineering methods described above or by phage display selection. Anti-idiotype antibodies may be further engineered to provide a chimeric or humanized anti-idiotype antibody, according to the description provided in detail herein. An anti-idiotype antibody may bind specifically to the antigen-binding site of the anti-RPTP antibody such that binding of the antibody to the RPTP is competitively inhibited. Alternatively, an anti-idiotype antibody as provided herein may not competitively inhibit binding of an anti-RPTP antibody to the RPTP.

[0293] In one embodiment, an anti-idiotype antibody may be used to alter the immunoresponsiveness of an immune cell. In certain embodiments, an anti-idiotype antibody may be used to suppress the immunoresponsiveness of an immune cell and to treat an immunological disease or disorder. An anti-idiotype antibody specifically binds to an antibody that specifically binds to LAR, RPTP-δ, and/or RPTP-σ, and the antigen-binding site of the anti-idiotype antibody mimics the epitope of the RPTP, that is, the anti-idiotype antibody will bind to cognate ligands as well as antibodies that specifically bind to the RPTP. Thus, an anti-idiotype antibody may be useful for preventing, blocking, or reducing binding of a cognate ligand that when such ligand binds to an RPTP, it stimulates, induces, or enhances the immunoresponsiveness of an immune cell.

[0294] Anti-idiotype antibodies are also useful for immunoassays to determine the presence of anti-RPTP antibodies in a biological sample. For example, immunoassays, such as an ELISA and other assays described herein that are practiced by persons skilled in the art, may be used to determine the presence of an immune response induced by administering (i.e., immunizing) a host with an RPTP polypeptide or fragment thereof as described herein.

[0295] In certain embodiments, an antibody specific for LAR, RPTP-δ, and/or RPTP-σ may be an antibody or antigen-binding fragment thereof that is expressed as an intracellular protein. Such intracellular antibodies are also referred to as intrabodies and may comprise an Fab fragment, a Fv fragment, a scFv molecule, an scFv-Fc fusion antibody, or a bispecific antibody, all of which may be made as described herein and according to methods practiced in the art (see, e.g., Lobato et al., Curr. Mol. Med. 4:519-28 (2004); Strube et al., Methods 34:179-83 (2004); Lecerf et al., Proc. Natl. Acad. Sci. USA 98:4764-49 (2001); (Weisbart et al., Int. J. Oncol. 25:1113-18 (2004)). An antibody that would be useful in the form of an intrabody includes an antibody that specifically binds to the intracellular portion of an RPTP. For example, an antibody that bound to an epitope within a region of the intracellular portion of LAR, RPTP-δ, and/or RPTP-σ, for example, which includes the catalytic domains D1 and D2 and a region comprising a peptide having the sequence set forth in SEQ ID NO:51.

[0296] The framework regions flanking the CDR regions can be modified to improve expression levels, stability, and/or solubility of an intrabody in an intracellular reducing environment (see, e.g., Auf der Maur et al., Methods 34:215-24 (2004); Strube et al., supra; Worn et al., J. Biol. Chem. 275:2795-803 (2000)). An intrabody may be directed to a particular cellular location or organelle, for example by constructing a vector that comprises a polynucleotide sequence encoding the variable regions of an intrabody that may be operatively fused to a polynucleotide sequence that encodes a particular target antigen within the cell (see, e.g., Graus-Porta et al., Mol. Cell Biol. 15:1182-91 (1995); Lener et al., Eur. J. Biochem. 267:1196-205 (2000); Popkov et al., Cancer Res. 65:972-81 (2005)). Various types of intrabodies have been investigated as therapeutic agents for treating cancer (see, e.g., Weisbart et al., supra; Popkov et al., supra; Krauss et al., Breast Dis. 11:113-24 (1999)) and for treating neurodegenerative diseases such as Parkinson's disease (Zhou et al., Mol. Ther. 10:1023-31 (2004)) and Huntington's disease (Murphy et al., Brain Res. Mol. Brain Res. 121:141-45 (2004); Colby et al., J. Mol. Biol. 342:901-12 (2004); Colby et al., Proc. Natl. Acad. Sci. USA 101:17616-21 (2004), Erratum in Proc. Natl. Acad. Sci. USA 102:955 (2005)). An intrabody may be introduced into a cell by a variety of techniques available to the skilled artisan including via a gene therapy vector, a lipid mixture (e.g., Provectin™ manufactured by Imgenex Corporation, San Diego, Calif.), photochemical internalization methods, or other methods known in the art.

Expression of A41L, 130L RPTPs, and Polypeptide Agents

[0297] The polypeptides described herein including A41L, 130L, RPTPs (LAR, RPTP-δ, and RPTP-σand fusion polypeptides (e.g., peptide-IgFc fusion polypeptides, RPTP Ig domain-Fc fusion polypeptides) may be expressed using vectors and constructs, particularly recombinant expression constructs, that include any polynucleotide encoding such polypeptides. Host cells are genetically engineered with vectors and/or constructs to produce these polypeptides and fusion proteins, or fragments or variants thereof, by recombinant techniques. Each of the polypeptides and fusion polypeptides described herein can be expressed in mammalian cells, yeast, bacteria, or other cells under the control of appropriate promoters. Cell-free translation systems can also be employed to produce such proteins using RNAs derived from DNA constructs. Appropriate cloning and expression vectors for use with prokaryotic and eukaryotic hosts are described, for example, by Sambrook, et al., Molecular Cloning: A Laboratory Manual, Third Edition, Cold Spring Harbor, N.Y., (2001).

[0298] Generally, recombinant expression vectors include origins of replication, selectable markers permitting transformation of the host cell, for example, the ampicillin resistance gene of E. coli and S. cerevisiae TRP1 gene, and a promoter derived from a highly expressed gene to direct transcription of a downstream structural sequence. Promoters can be derived from operons encoding glycolytic enzymes such as 3-phosphoglycerate kinase (PGK), α-factor, acid phosphatase, or heat shock proteins, among others. The heterologous structural sequence is assembled in appropriate phase with translation initiation and termination sequences.

[0299] Optionally, a heterologous sequence can encode a fusion protein that includes an amino terminal or carboxy terminal identification peptide or polypeptide that imparts desired characteristics, e.g., that stabilizes the produced polypeptide or that simplifies purification of the expressed recombinant product. Such identification peptides include a polyhistidine tag (his tag) or FLAG® epitope tag (DYKDDDDK, SEQ ID NO:62), beta-galatosidase, alkaline phosphatase, GST, or the XPRESS™ epitope tag (DLYDDDDK, SEQ ID NO:63; Invitrogen Life Technologies, Carlsbad, Calif.) and the like (see, e.g., U.S. Pat. No. 5,011,912; Hopp et al., (Bio/Technology 6:1204 (1988)). The affinity sequence may be supplied by a vector, such as, for example, a hexa-histidine tag that is provided in pBAD/His (Invitrogen). Alternatively, the affinity sequence may be added either synthetically or engineered into the primers used to recombinantly generate the nucleic acid coding sequence (e.g., using the polymerase chain reaction).

[0300] Host cells containing described recombinant expression constructs may be genetically engineered (transduced, transformed, or transfected) with the vectors and/or expression constructs (for example, a cloning vector, a shuttle vector, or an expression construct). The vector or construct may be in the form of a plasmid, a viral particle, a phage, etc. The engineered host cells can be cultured in conventional nutrient media modified as appropriate for activating promoters, selecting transformants, or amplifying particular genes or encoding-nucleotide sequences. Selection and maintenance of culture conditions for particular host cells, such as temperature, pH and the like, will be readily apparent to the ordinarily skilled artisan. Preferably the host cell can be adapted to sustained propagation in culture to yield a cell line according to art-established methodologies. In certain embodiments, the cell line is an immortal cell line, which refers to a cell line that can be repeatedly (at least ten times while remaining viable) passaged in culture following log-phase growth. In other embodiments the host cell used to generate a cell line is a cell that is capable of unregulated growth, such as a cancer cell, or a transformed cell, or a malignant cell.

[0301] Useful bacterial expression constructs are constructed by inserting into an expression vector a structural DNA sequence encoding a desired protein together with suitable translation initiation and termination signals in operable reading phase with a functional promoter. The construct may comprise one or more phenotypic selectable markers and an origin of replication to ensure maintenance of the vector construct and, if desirable, to provide amplification within the host. Suitable prokaryotic hosts for transformation include E. coli, Bacillus subtilis, Salmonella typhimurium and various species within the genera Pseudomonas, Streptomyces, and Staphylococcus, although others may also be employed as a matter of choice. Any other plasmid or vector may be used as long as they are replicable and viable in the host. Thus, for example, the nucleic acids as provided herein may be included in any one of a variety of expression vector constructs as a recombinant expression construct for expressing a polypeptide. Such vectors and constructs include chromosomal, nonchromosomal, and synthetic DNA sequences, e.g., bacterial plasmids; phage DNA; baculovirus; yeast plasmids; vectors derived from combinations of plasmids and phage DNA; viral DNA, such as vaccinia, adenovirus, fowl pox virus, and pseudorabies. However, any other vector may be used for preparation of a recombinant expression construct as long as it is replicable and viable in the host.

[0302] The appropriate DNA sequence(s) may be inserted into the vector by a variety of procedures. In general, the DNA sequence is inserted into an appropriate restriction endonuclease site(s) by procedures known in the art. Standard techniques for cloning, DNA isolation, amplification and purification, for enzymatic reactions involving DNA ligase, DNA polymerase, restriction endonucleases and the like, and various separation techniques are those known and commonly employed by those skilled in the art. Numerous standard techniques are described, for example, in Ausubel et al. (Current Protocols in Molecular Biology (Greene Publ. Assoc. Inc. & John Wiley & Sons, Inc., 1993)); Sambrook et al. (Molecular Cloning: A Laboratory Manual, 3rd Ed., (Cold Spring Harbor Laboratory 2001)); Maniatis et al. (Molecular Cloning, (Cold Spring Harbor Laboratory 1982)), and elsewhere.

[0303] The DNA sequence encoding a polypeptide in the expression vector is operatively linked to at least one appropriate expression control sequences (e.g., a promoter or a regulated promoter) to direct mRNA synthesis. Representative examples of such expression control sequences include LTR or SV40 promoter, the E. coli lac or trp, the phage lambda P_{L} promoter, and other promoters known to control expression of genes in prokaryotic or eukaryotic cells or their viruses. Promoter regions can be selected from any desired gene using CAT (chloramphenicol transferase) vectors or other vectors with selectable markers. Particular bacterial promoters include lacI, lacZ, T3, T5, T7, gpt, lambda P_{R}, P_{L}, and trp. Eukaryotic promoters include CMV immediate early, HSV thymidine kinase, early and late SV40, LTRs from retroviruses, and mouse metallothionein-I. Selection of the appropriate vector and promoter and preparation of certain recombinant expression constructs comprising at least one promoter or regulated promoter operatively linked to a nucleic acid described herein is well within the level of ordinary skill in the art.

[0304] Design and selection of inducible, regulated promoters and/or tightly regulated promoters are known in the art and will depend on the particular host cell and expression system. The pBAD Expression System (Invitrogen Life Technologies, Carlsbad, Calif.) is an example of a tightly regulated expression system that uses the E. coli arabinose operon (P_{BAD} or P_{ARA}) (see Guzman et al., J. Bacteriology 177:4121-30 (1995); Smith et al., J. Biol. Chem. 253:6931-33 (1978); Hirsh et al., Cell 11:545-50 (1977)), which controls the arabinose metabolic pathway. A variety of vectors employing this system are. commercially available. Other examples of tightly regulated promoter-driven expression systems include PET Expression Systems (see U.S. Pat. No. 4.952,496) available from Stratagene (La Jolla, Calif.) or tet-regulated expression systems (Gossen et al., Proc. Natl. Acad. Sci. USA 89:5547-51 (1992); Gossen et al., Science 268:1766-69 (1995)). The pLP-TRE2 Acceptor Vector (BD Biosciences Clontech, Palo Alto, Calif.) is designed for use with CLONTECH's Creator™ Cloning Kits to rapidly generate a tetracycline-regulated expression construct for tightly controlled, inducible expression of a gene of interest using the site-specific Cre-lox recombination system (see, e.g., Sauer, Methods 14:381-92 (1998); Furth, J. Mamm. Gland Biol. Neoplas. 2:373 (1997)), which may also be employed for host cell immortalization (see, e.g., Cascio, Artif Organs 25:529 (2001)).

[0305] The vector may be a viral vector such as a retroviral vector. For example, retroviruses from which the retroviral plasmid vectors may be derived include, but are not limited to, Moloney Murine Leukemia Virus, spleen necrosis virus, Rous Sarcoma Virus, Harvey Sarcoma virus, avian leukosis virus, gibbon ape leukemia virus, human immunodeficiency virus, adenovirus, Myeloproliferative Sarcoma Virus, and mammary tumor virus. A viral vector also includes one or more promoters. Suitable promoters that may be employed include, but are not limited to, the retroviral LTR; the SV40 promoter; and the human cytomegalovirus (CMV) promoter described in Miller et al., Biotechniques 7:980-990 (1989), or any other promoter (e.g., eukaryotic cellular promoters including, for example, the histone, pol III, and β-actin promoters). Other viral promoters that may be employed include, but are not limited to, adenovirus promoters, thymidine kinase (TK) promoters, and B19 parvovirus promoters.

[0306] The retroviral plasmid vector is employed to transduce packaging cell lines (e.g., PE501, PA317, ψ-2, ψ-AM, PA12, T19-14X, VT-19-17-H2, ψCRE, ψCRIP, GP+E-86, GP+envAm12, DAN; see also, e.g., Miller, Human Gene Therapy, 1:5-14 (1990)) to form producer cell lines. The vector may transduce the packaging cells through any means known in the art, such as, for example, electroporation, the use of liposomes, and calcium phosphate precipitation. The producer cell line generates infectious retroviral vector particles that include the nucleic acid sequence(s) encoding the polypeptides or fusion proteins described herein. Such retroviral vector particles then may be employed, to transduce eukaryotic cells, either in vitro or in vivo. Eukaryotic cells that may be transduced include, for example, embryonic stem cells, embryonic carcinoma cells, hematopoietic stem cells, hepatocytes, fibroblasts, myoblasts, keratinocytes, endothelial cells, bronchial epithelial cells, and other culture-adapted cell lines.

[0307] As another example, host cells transduced by a recombinant viral construct directing the expression of polypeptides or fusion proteins may produce viral particles containing expressed polypeptides or fusion proteins that are derived from portions of a host cell membrane incorporated by the viral particles during viral budding. The polypeptide-encoding nucleic acid sequences may be cloned into a baculovirus shuttle vector, which is then recombined with a baculovirus to generate a recombinant baculovirus expression construct that is used to infect, for example, Sf9 host cells (see, e.g., Baculovirus Expression Protocols, Methods in Molecular Biology Vol. 39, Richardson, Ed. (Human Press 1995); Piwnica-Worms, “Expression of Proteins in Insect Cells Using Baculoviral Vectors,” Section II, Chapter 16 in Short Protocols in Molecular Biology, 2^{nd} Ed., Ausubel et al., eds., (John Wiley & Sons 1992), pages 16-32 to 16-48).

Methods for Identifying and Characterizing Agents that Alter Immunoresponsiveness of an Immune Cell

[0308] Methods are provided herein for identifying or selecting an agent that alters (suppresses or enhances in a statistically significant or biologically significant manner, preferably suppresses) immunoresponsiveness of an immune cell or for determining the capability of an agent described herein to alter the immunoresponsiveness of an immune cell. In one embodiment, a method is provided for identifying an agent that suppresses immunoresponsiveness of an immune cell comprises contacting (mixing, combining, or in some manner permitting interaction of) (1) a candidate agent; (2) an immune cell that expresses at least one of the RPTPs, LAR, RPTP-δ, and RPTP-σ; and (3) a poxvirus polypeptide such as A41L or 130L, under conditions and for a time sufficient to permit interaction between the at least one RPTP and the poxvirus polypeptide, and then determining the level of binding of the poxvirus polypeptide (i.e., A41L or 130L) to the immune cell in the presence and absence of the candidate agent. A decrease in binding of the poxvirus polypeptide to the immune cell in the presence of the candidate agent indicates that the candidate agent suppresses immunoresponsiveness of the immune cell. In certain embodiments, an immune cell expresses at least two of LAR, RPTP-δ, and RPTP-σ (such as LAR and RPTP-δ; LAR and RPTP-σ, and RPTP-δ and RPTP-σ) and in other particular embodiments, an immune cell expresses all three RPTPs. The immune cell may be present in or isolated from a biological sample as described herein. For example, the immune cell may be obtained from a primary or long-term cell culture or may be present in or isolated from a biological sample obtained from a subject (human or non-human animal).

[0309] In another embodiment, a method is provided for identifying an agent that inhibits binding of a poxvirus polypeptide, such as A41L or 130L, to at least two RPTPs (that is, at least two of LAR, RPTP-δ, and RPTP-σ). The method comprises contacting (mixing, combining, or in some manner permitting interaction among) (1) a candidate agent; (2) a biological sample comprising at least two RPTP polypeptides selected from (i) LAR; (ii) RPTP-σ; and (iii) RPTP-δ; and (3) the poxvirus polypeptide, under conditions and for a time sufficient to permit interaction between the at least two RPTP polypeptides and the poxvirus polypeptide. The level of binding of the poxvirus polypeptide to the at least two RPTP polypeptides is then determined in the presence of the candidate agent and compared with the level of binding of the poxvirus polypeptide to each of the at least two RPTP polypeptides in the absence of the candidate agent. A decrease in the level of binding of the poxvirus polypeptide to the at least two RPTP polypeptides in the presence of the candidate agent indicates that the candidate agent inhibits binding of the poxvirus polypeptide to the at least two RPTP polypeptides In another embodiment, the candidate agent is contacted with a biological sample that comprises LAR, RPTP-σ, and RPTP-δ and the level of binding in the presence and absence of the agent to each of the phosphatases is determined.

[0310] Appropriate conditions for permitting interaction of the reaction components according to this method and other methods described herein include, for example, appropriate concentrations of reagents and components (including the poxvirus polypeptide and the candidate agent and the RPTP(s), temperature, and buffers with which a skilled person will be familiar. Concentrations of reaction components, buffers, temperature, and time period sufficient to permit interaction of the reaction components can be determined and/or adjusted according to methods described herein and with which persons skilled in the art are familiar. To practice the methods described herein, a person skilled in the art will also readily appreciate and understand which controls are appropriately included when practicing these methods.

[0311] Numerous assays and techniques are practiced by persons skilled in the art for determining the interaction between or binding between a biological molecule and a cognate ligand. Accordingly, interaction between a poxvirus polypeptide, A41L and/or 130L, and any one or more of LAR, RPTP-σ, and RPTP-δ including the effect of a bioactive agent on this interaction and/or binding in the presence of the agent can be readily determined by such assays and techniques, which may include a competitive assay format. Exemplary methods include but are not limited to fluorescence resonance energy transfer, fluorescence polarization, time-resolved fluorescence resonance energy transfer, scintillation proximity assays, reporter gene assays, fluorescence quenched enzyme substrate, chromogenic enzyme substrate and electrochemiluminescence, immunoassays, (such as enzyme-linked immunosorbant assays (ELISA), radioimmunoassay, immunoblotting, immunohistochemistry, and the like), surface plasmon resonance, cell-based assays such as those that use reporter genes, and functional assays (e.g., assays that measure dephosphorylation of a tyrosine phosphorylated substrate by one or more of LAR, RPTP-σ, and RPTP-δ and assays that measure immune function and immunoresponsiveness). Many of the methods described herein and known to those skilled in the art may be adapted to high throughput screening for analyzing large numbers of bioactive agents such as from libraries of compounds to determine the effect of an agent on the binding, interaction, or biological function of the poxvirus polypeptide and/or LAR, RPTP-σ, and RPTP-δ and the effect of an agent on immunoresponsiveness of an immune cell (see, e.g., High Throughput Screening: The Discovery of Bioactive Substances, Devlin, ed., (Marcel Dekker N.Y., 1997)).

[0312] The techniques and assay formats may also include secondary reagents, such as specific antibodies, that are useful for detecting and/or amplifying a signal that indicates formation of a complex, such as between a poxvirus polypeptide (e.g., A41L or 130L) and an RPTP. One or more of the assay components or secondary reagents may be attached to a detectable moiety (or label or reporter molecule) such as an enzyme, cytotoxicity agent, or other reporter molecule, including a dye, radionuclide, luminescent group, fluorescent group, or biotin, or the like. Techniques for radiolabeling of antibodies and other polypeptides are known in the art (see, e.g., Adams, In Vivo 12:11-21 (1998); Hiltunen, Acta Oncol. 32:831-9 (1993)). The detectable moiety may be attached to a polypeptide (e.g., an antibody), such as through any available amino acid side-chain, terminal amino acid, or carbohydrate functional group located in the polypeptide, provided that the attachment or attachment process does not adversely affect the binding properties such that the usefulness of the molecule is abrogated. Particular functional groups include, for example, any free amino, imino, thiol, hydroxyl, carboxyl, or aldehyde group. Attachment of the polypeptide and the detectable moiety may be achieved via such groups and an appropriate functional group in the detectable moiety. The linkage may be direct or indirect through spacing or bridging groups (see, e.g, International Patent Application Publication Nos. WO 93/06231, WO 92/22583, WO 90/091195, and WO 89/01476; see also, e.g., commercial vendors such as Pierce Biotechnology, Rockford, Ill.).

[0313] A “biological sample” as used herein refers in certain embodiments to a sample containing at least one of LAR, RPTP-σ, and RPTP-δ or a poxvirus polypeptide or variant thereof. A biological sample may be a blood sample (from which serum or plasma may be prepared), biopsy specimen, body fluids (e.g., lung lavage, ascites, mucosal washings, synovial fluid), bone marrow, lymph nodes, tissue explant, organ culture, or any other tissue or cell preparation from a subject or a biological source. A sample may further refer to a tissue or cell preparation in which the morphological integrity or physical state has been disrupted, for example, by dissection, dissociation, solubilization, fractionation, homogenization, biochemical or chemical extraction, pulverization, lyophilization, sonication, or any other means for processing a sample derived from a subject or biological source. The subject or biological source may be a human or non-human animal, a primary cell culture (e.g., immune cells, virus infected cells), or culture adapted cell line, including but not limited to, genetically engineered cell lines that may contain chromosomally integrated or episomal recombinant nucleic acid sequences, immortalized or immortalizable cell lines, somatic cell hybrid cell lines, differentiated or differentiatable cell lines, transformed cell lines, and the like.

[0314] Candidate agents include but are not limited to an antibody, or antigen-binding fragment thereof, as described herein, and which may be also include a bispecific or bifunctional antibody, chimeric antibody, human or humanized antibody, scFv, or diabody, and the like. Additional agents described herein that are useful for altering the immunoresponsiveness of an immune cell (in certain embodiments, suppressing the immunoresponsiveness of an immune cell) and for treating an immunological disease or disorder include but are not limited to small molecules, peptide-immunoglobulin constant region fusion polypeptides such as a peptide-IgFc fusion polypeptide, aptamers, siRNA polynucleotides, antisense nucleic acids, ribozymes, and peptide nucleic acids.

Immune Cells and Immune Response

[0315] An immune cell is any cell of the immune system, including a lymphocyte and a non-lymphoid cell such as accessory cell. Lymphocytes are cells that specifically recognize and respond to foreign antigens, and accessory cells are those that are not specific for certain antigens but are involved in the cognitive and activation phases of immune responses. For example, mononuclear phagocytes (macrophages), other leukocytes (e.g., granulocytes, including neutrophils, eosinophils, basophils), and dendritic cells function as accessory cells in the induction of an immune response. The activation of lymphocytes by a foreign antigen leads to induction or elicitation of numerous effector mechanisms that function to eliminate the antigen. Accessory cells such as mononuclear phagocytes that effect or are involved with the effector mechanisms are also called effector cells.

[0316] Major classes of lymphocytes include B lymphocytes (B cells), T lymphocytes (T cells), and natural killer (NK) cells, which are large granular lymphocytes. B cells are capable of producing antibodies. T lymphocytes are further subdivided into helper T cells (CD4+) and cytolytic or cytotoxic T cells (CD8+). Helper cells secrete cytokines that promote proliferation and differentiation of the T cells and other cells, including B cells and macrophages, and recruit and activate inflammatory leukocytes. Another subgroup of T cells, called regulatory T cells or suppressor T cells actively suppress activation of the immune system and prevent pathological self-reactivity, that is, autoimmune disease. The immunosuppressive cytokines, TGF-beta and interleukin-10 (IL-10), have also been implicated in regulatory T cell function.

[0317] In general, an immune response may include a humoral response, in which antibodies specific for antigens are produced by differentiated B lymphocytes known as plasma cells. An immune response may also include, in addition to or instead of a humoral response, a cell-mediated response, in which various types of T lymphocytes act to eliminate antigens by a number of mechanisms. For example, helper T cells that are capable of recognizing specific antigens may respond by releasing soluble mediators such as cytokines to recruit additional cells of the immune system to participate in an immune response. Also, cytotoxic T cells that are also capable of specific antigen recognition may respond by binding to and destroying or damaging an antigen-bearing cell or particle.

[0318] An immune response in a host or subject may be determined by any number of well-known immunological methods described herein and with which those having ordinary skill in the art will be readily familiar. Such assays include, but need not be limited to, in vivo or in vitro determination of soluble antibodies, soluble mediators such as cytokines (e.g., IFN-γ, IL-2, IL-4, IL-10, IL-12, and TGF-β), lymphokines, chemokines, hormones, growth factors, and the like, as well as other soluble small peptide, carbohydrate, nucleotide and/or lipid mediators; cellular activation state changes as determined by altered functional or structural properties of cells of the immune system, for example cell proliferation, altered motility, induction of specialized activities such as specific gene expression or cytolytic behavior; cellular differentiation by cells of the immune system, including altered surface antigen expression profiles or the onset of apoptosis (programmed cell death). Procedures for performing these and similar assays are may be found, for example, in Lefkovits (Immunology Methods Manual: The Comprehensive Sourcebook of Techniques, 1998). See also Current Protocols in Immunology; Weir, Handbook of Experimental Immunology, Blackwell Scientific, Boston, Mass. (1986); Mishell and Shigii (eds.) Selected Methods in Cellular Immunology, Freeman Publishing, San Francisco, Calif. (1979); Green and Reed, Science 281:1309 (1998) and references cited therein).

[0319] The capability of a poxvirus polypeptide such as A41L or 130L, or a fragment or variant thereof, and of an agent (e.g., an antibody or antigen-binding fragment thereof that specifically binds to LAR, RPTP-σ, and/or RPTP-δ; nucleic acid molecule (such as an aptamer, siRNA, antisense polynucleotide); peptide-IgFc fusion polypeptide) described herein to suppress immunoresponsiveness of an immune cell and thus be useful for treating an immunological disease or disorder, such as an autoimmune disease or inflammatory disease or disorder, cardiovascular disease or disorder, a metabolic disease or disorder, or a proliferative disease or disorder, may be determined and evaluated in any one of a number of animal models described herein and used by persons skilled in the art (see, e.g., reviews by Taneja et al., Nat. Immunol. 2:781-84 (2001); Lam-Tse et al., Springer Semin. Immunopathol. 24:297-321 (2002)). For example, mice that have three genes, Tyro3, Mer, and Axl that encode receptor tyrosine kinases, knocked out exhibit several symptoms of autoimmune diseases, including rheumatoid arthritis and SLE (Lu et al., Science 293:228-29 (2001)). A murine model of spontaneous lupus-like disease has been described using NZB/WF1 hybrid mice (see, e.g., Drake et al., Immunol. Rev. 144:51-74 (1995)). An animal model for type I diabetes that permits testing of agents and molecules that affect onset, modulation, and/or protection of the animal from disease uses MHC transgenic (Tg) mice. Mice that express the HLA-DQ8 transgene (HLA-DQ8 is the predominant predisposing gene in human type 1 diabetes) and the HLA-DQ6 transgene (which is diabetes protective) were crossed with RIP(rat insulin promoter).B7-1-Tg mice to provide HLA-DQ8 RIP.B7-1 transgenic mice that develop spontaneous diabetes (see Wakeland et al., Curr. Opin. Immunol. 11:701-707 (1999); Wen et al., J. Exp. Med. 191:97-104 (2000)). (See also Brondum et al., Horm. Metab. Res. 37 Suppl 1:56-60 (2005)).

[0320] Animal models that may be used for characterizing agents that are useful for treating rheumatoid arthritis include a collagen-induced arthritis model (see, e.g., Kakimoto, Chin. Med. Sci. J. 6:78-83 (1991); Myers et al., Life Sci. 61:1861-78 (1997)) and an anti-collagen antibody-induced arthritis model (see, e.g., Kakimoto, supra). Other applicable animal models for immunological diseases include an experimental autoimmune encephalomyelitis model (also called experimental allergic encephalomyelitis model), an animal model of multiple sclerosis; a psoriasis model that uses AGR129 mice that are deficient in type I and type II interferon receptors and deficient for the recombination activating gene 2 (Zenz et al., Nature 437:369-75 (2005); Boyman et al., J. Exp. Med. 199:731-36 (2004); published online Feb. 23, 2004); and a TNBS (2,4,6-trinitrobenzene sulphonic acid) mouse model for inflammatory bowel disease. Numerous animal models for cardiovascular disease are available and include models described in van Vlijmen et al., J. Clin. Invest. 93:1403-10 (1994); Kiriazis et al., Annu. Rev. Physiol. 62:321-51 (2000); Babu et al., Methods Mol. Med. 112:365-77 (2005).

Treatment of Immunological Disorders and Disease

[0321] In another embodiment, methods are provided for treating and/or preventing immunological diseases and disorders, particularly an inflammatory disease or disorder, an autoimmune disease or disorder, cardiovascular disease or disorder, a metabolic disease or disorder, or a proliferative disease or disorder disease as described herein. A subject in need of such treatment may be a human or may be a non-human primate or other animal (i.e., veterinary use) who has developed symptoms of an immunological disease or who is at risk for developing an immunological disease. Examples of non-human primates and other animals include but are not limited to farm animals, pets, and zoo animals (e.g., horses, cows, buffalo, llamas, goats, rabbits, cats, dogs, chimpanzees, orangutans, gorillas, monkeys, elephants, bears, large cats, etc.). In certain embodiments, compositions are provided that comprise an antibody, or antigen-binding fragment thereof, bispecific antibody, fusion polypeptide, RPTP Ig domain polypeptide (monomer or multimer), macromolecule, nucleic acid, or other agent, as described herein plus a pharmaceutically acceptable excipient.

[0322] As described herein, a method is provided for altering (e.g., suppressing or enhancing) an immune response in a subject (host or patient) who has or who is at risk for developing an immunological disease or disorder, by administering a composition that comprises a pharmaceutically acceptable carrier and an antibody, or antigen-binding fragment thereof, that specifically binds to at least one of LAR, RPTP-σ, and RPTP-δ. In particular embodiments, the antibody or antigen-binding fragment thereof is capable of inhibiting, preventing, or competing with binding of A41L or 130L to the RPTP. In certain embodiments, the composition comprises an antibody, or antigen-binding fragment thereof, that specifically binds to RPTP-σ, and in another certain embodiment, the composition comprises an antibody, or antigen-binding fragment thereof, that specifically binds to RPTP-δ. Also provided is a method for altering (e.g., suppressing or enhancing) an immune response in a subject (host or patient) who has or who is at risk for developing an immunological disease or disorder, by administering a composition that comprises a pharmaceutically acceptable carrier and an antibody (i.e., at least) or antigen-binding fragment thereof, that specifically binds to at least two of LAR, RPTP-σ, and RPTP-δ (e.g., LAR and RPTP-σ; LAR and RPTP-δ; RPTP-σ and RPTP-δ). In a particular embodiment, such a method suppresses an immune response in a subject. Alternatively, the composition comprises an antibody, or antigen-binding fragment thereof, that specifically binds to all three RPTPs. In certain embodiments, the composition comprises a pharmaceutically acceptable carrier and at least one antibody that binds to all three of LAR, RPTP-σ, and RPTP-δ. In other embodiments, the composition comprises any two or more of the antibodies, or antigen-binding fragment thereof, described herein. Accordingly, a composition for altering (suppressing or enhancing) an immune response comprises at least one antibody that binds to LAR, at least one antibody that binds to RPTP-σ, and at least one antibody that binds to RPTP-δ. In another embodiment, the composition comprises at least one antibody that binds to LAR, and at least one antibody that binds to both RPTP-σ and RPTP-δ. Also contemplated and described herein is a composition that comprises at least one first antibody that binds any two of LAR, RPTP-σ, and RPTP-δ and at least one second antibody that binds to the RPTP that is not specifically recognized by the at least one first antibody.

[0323] In another embodiment, a method for treating an immunological disease or disorder is provided wherein the method comprises administering to a subject in need thereof a pharmaceutically suitable carrier and an agent that alters a biological activity of at least one of LAR, RPTP-σ, or RPTP-δ, or that alters a biological activity of at least two of or all three of LAR, RPTP-σ, and RPTP-δ. An agent as described herein (including an antibody, or antigen-binding fragment thereof; a small molecule; an aptamer; an antisense polynucleotide; a small interfering RNA (siRNA); a peptide-IgFc fusion polypeptide or peptide Ig constant region domain fusion polypeptide; a RPTP Ig-like domain polypeptide (monomer or multimer), and a RPTP Ig-like domain-Ig constant region domain fusion polypeptide, all of which are described in detail herein) that is useful for treating an immunological disease or disorder is capable of altering (increasing or decreasing in a statistically significant or biological significant manner) at least one biological activity (function) of the at least one RPTP. In other embodiments, the agent alters at least one biological function of at least one, two or all three of LAR, RPTP-σ, and RPTP-δ. As described herein, these protein tyrosine phosphatases dephosphorylate tyrosyl phosphoproteins, and along with protein tyrosine kinases regulate reversible tyrosine phosphorylation in a dynamic relationship that is integrated in a cell. The regulated phosphorylation and dephosphorylation of tyrosine residues of substrates in signal transduction pathways is a major control mechanism for cellular processes such as cell growth, cell proliferation, metabolism, differentiation, and locomotion. An agent used for treating an immunological disease or disorder may therefore affect or alter any one or more of the biological activities or functions of at least one, two, or all three of LAR, RPTP-σ, and RPTP-δ including (1) the capability to dephosphorylate a tyrosyl phosphorylated substrate (i.e., affect the catalytic activity); (2) the capability to affect cell proliferation; (3) the capability to affect cellular metabolism; (4) the capability to affect cell differentiation;

[0324] and (5) the capability to affect cell locomotion; (6) the capability to affect the function of another component in the same signal transduction pathway.

[0325] The agents, compositions, antibodies or fragments thereof, fusion polypeptides, RPTP Ig domain polypeptides, molecules, and methods described herein may be used for treating (i.e., curing, preventing, ameliorating the symptoms of, or slowing, inhibiting, or stopping the progression of) an immunological disease or disorder. A particular disease or disorder may be treated by administering an effective amount of a particular agent, which can be readily determined by persons skilled in the medical art. Such diseases and disorders that are autoimmune or inflammatory disorders include but are not limited to multiple sclerosis, rheumatoid arthritis, systemic lupus erythematosus (SLE), graft versus host disease (GVHD), sepsis, diabetes, psoriasis, atherosclerosis, Sjogren's syndrome, progressive systemic sclerosis, scleroderma, acute coronary syndrome, ischemic reperfusion, Crohn's Disease, endometriosis, glomerulonephritis, myasthenia gravis, idiopathic pulmonary fibrosis, asthma, acute respiratory distress syndrome (ARDS), vasculitis, or inflammatory autoimmune myositis. An immunological disorder or disease also includes a cardiovascular disease or disorder, a metabolic disease or disorder, or a proliferative disease or disorder. A cardiovascular disease or disorder that may be treated according to the methods and with the agents described herein includes, for example, atherosclerosis, endocarditis, hypertension, or peripheral ischemic disease. Metabolic diseases that also are immunological disorders or diseases include diabetes, Crohn's Disease, and inflammatory bowel disease. An exemplary proliferative disease is cancer.

[0326] As used herein, a patient (or subject) may be any mammal, including a human, that may have or be afflicted with an immunological disease or disorder, or that may be free of detectable disease. Accordingly, the treatment may be administered to a subject who has an existing disease, or the treatment may be prophylactic, administered to a subject who is at risk for developing the disease or condition.

[0327] A pharmaceutical composition may be a sterile aqueous or non-aqueous solution, suspension or emulsion, which additionally comprises a physiologically acceptable excipient (pharmaceutically acceptable or suitable excipient or carrier) (i.e., a non-toxic material that does not interfere with the activity of the active ingredient). Such compositions may be in the form of a solid, liquid, or gas (aerosol). Alternatively, compositions described herein may be formulated as a lyophilizate, or compounds may be encapsulated within liposomes using technology known in the art. Pharmaceutical compositions may also contain other components, which may be biologically active or inactive. Such components include, but are not limited to, buffers (e.g., neutral buffered saline or phosphate buffered saline), carbohydrates (e.g., glucose, mannose, sucrose or dextrans), mannitol, proteins, polypeptides or amino acids such as glycine, antioxidants, chelating agents such as EDTA or glutathione, stabilizers, dyes, flavoring agents, and suspending agents and/or preservatives.

[0328] Any suitable excipient or carrier known to those of ordinary skill in the art for use in pharmaceutical compositions may be employed in the compositions described herein. Excipients for therapeutic use are well known, and are described, for example, in Remingtons Pharmaceutical Sciences, Mack Publishing Co. (A. R. Gennaro ed. 1985). In general, the type of excipient is selected based on the mode of administration. Pharmaceutical compositions may be formulated for any appropriate manner of administration, including, for example, topical, oral, nasal, intrathecal, rectal, vaginal, intraocular, subconjunctival, sublingual or parenteral administration, including subcutaneous, intravenous, intramuscular, intrasternal, intracavernous, intrameatal or intraurethral injection or infusion. For parenteral administration, the carrier preferably comprises water, saline, alcohol, a fat, a wax or a buffer. For oral administration, any of the above excipients or a solid excipient or carrier, such as mannitol, lactose, starch, magnesium stearate, sodium saccharine, talcum, cellulose, kaolin, glycerin, starch dextrins, sodium alginate, carboxymethylcellulose, ethyl cellulose, glucose, sucrose and/or magnesium carbonate, may be employed.

[0329] A pharmaceutical composition (e.g., for oral administration or delivery by injection) may be in the form of a liquid. A liquid pharmaceutical composition may include, for example, one or more of the following: a sterile diluent such as water for injection, saline solution, preferably physiological saline, Ringer's solution, isotonic sodium chloride, fixed oils that may serve as the solvent or suspending medium, polyethylene glycols, glycerin, propylene glycol or other solvents; antibacterial agents; antioxidants; chelating agents; buffers and agents for the adjustment of tonicity such as sodium chloride or dextrose. A parenteral preparation can be enclosed in ampoules, disposable syringes or multiple dose vials made of glass or plastic. The use of physiological saline is preferred, and an injectable pharmaceutical composition is preferably sterile.

[0330] The agents described herein, including antibodies and antigen-binding fragments thereof, and bispecific antibody that specifically bind to at least one of LAR, PTP-σ, and RPTP-δ, small molecules, nucleic acid molecules, RPTP Ig-like domain polypeptides, and peptide and polypeptide fusion proteins, may be formulated for sustained or slow release. Such compositions may generally be prepared using well known technology and administered by, for example, oral, rectal or subcutaneous implantation, or by implantation at the desired target site. Sustained-release formulations may contain an agent dispersed in a carrier matrix and/or contained within a reservoir surrounded by a rate controlling membrane. Excipients for use within such formulations are biocompatible, and may also be biodegradable; preferably the formulation provides a relatively constant level of active component release. The amount of active compound contained within a sustained release formulation depends upon the site of implantation, the rate and expected duration of release and the nature of the condition to be treated or prevented.

[0331] The dose of the composition for treating an immunological disease or disorder may be determined according to parameters understood by a person skilled in the medical art. Accordingly, the appropriate dose may depend upon the patient's (e.g., human) condition, that is, stage of the disease, general health status, as well as age, gender, and weight, and other factors familiar to a person skilled in the medical art.

[0332] Pharmaceutical compositions may be administered in a manner appropriate to the disease to be treated (or prevented) as determined by persons skilled in the medical arts. An appropriate dose and a suitable duration and frequency of administration will be determined by such factors as the condition of the patient, the type and severity of the patient's disease, the particular form of the active ingredient, and the method of administration. In general, an appropriate dose and treatment regimen provides the composition(s) in an amount sufficient to provide therapeutic and/or prophylactic benefit (e.g., an improved clinical outcome, such as more frequent complete or partial remissions, or longer disease-free and/or overall survival, or a lessening of symptom severity). For prophylactic use, a dose should be sufficient to prevent, delay the onset of, or diminish the severity of a disease associated with an immunological disease or disorder.

[0333] Optimal doses may generally be determined using experimental models and/or clinical trials. The optimal dose may depend upon the body mass, weight, or blood volume of the patient. In general, the amount of polypeptide, such as an antibody or antigen-binding fragment thereof, or a fusion polypeptide, or RPTP Ig domain polypeptide as described herein, present in a dose, or produced in situ by DNA present in a dose, ranges from about 0.01 μg to about 1000 μg per kg of host. The use of the minimum dosage that is sufficient to provide effective therapy is usually preferred. Patients may generally be monitored for therapeutic or prophylactic effectiveness using assays suitable for the condition being treated or prevented, which assays will be familiar to those having ordinary skill in the art. Suitable dose sizes will vary with the size of the patient, but will typically range from about 1 ml to about 500 ml for a 10-60 kg subject.

[0334] For pharmaceutical compositions comprising an agent that is a nucleic acid molecule including an aptamer, siRNA, antisense, or ribozyme, or peptide-nucleic acid, the nucleic acid molecule may be present within any of a variety of delivery systems known to those of ordinary skill in the art, including nucleic acid, and bacterial, viral and mammalian expression systems such as, for example, recombinant expression constructs as provided herein. Techniques for incorporating DNA into such expression systems are well known to those of ordinary skill in the art. The DNA may also be “naked,” as described, for example, in Ulmer et al., Science 259:1745-49, 1993 and reviewed by Cohen, Science 259:1691-1692, 1993. The uptake of naked DNA may be increased by coating the DNA onto biodegradable beads, which are efficiently transported into the cells.

[0335] Nucleic acid molecules may be delivered into a cell according to any one of several methods described in the art (see, e.g., Akhtar et al., Trends Cell Bio. 2:139 (1992); Delivery Strategies for Antisense Oligonucleotide Therapeutics, ed. Akhtar, 1995, Maurer et al., Mol. Membr. Biol. 16:129-40 (1999); Hofland and Huang, Handb. Exp. Pharmacol. 137:165-92 (1999); Lee et al., ACS Symp. Ser. 752:184-92 (2000); U.S. Pat. No. 6,395,713; International Patent Application Publication No. WO 94/02595); Selbo et al., Int. J. Cancer 87:853-59 (2000); Selbo et al., Tumour Biol. 23:103-12 (2002); U.S. Patent Application Publication Nos. 2001/0007666, and 2003/077829). Such delivery methods known to persons having skill in the art, include, but are not restricted to, encapsulation in liposomes, by iontophoresis, or by incorporation into other vehicles, such as biodegradable polymers; hydrogels; cyclodextrins (see, e.g., Gonzalez et al., Bioconjug. Chem. 10:1068-74 (1999); Wang et al., International Application Publication Nos. WO 03/47518 and WO 03/46185); poly(lactic-co-glycolic)acid (PLGA) and PLCA microspheres (also useful for delivery of peptides and polypeptides and other substances) (see, e.g., U.S. Pat. No. 6,447,796; U.S. Patent Application Publication No. 2002/130430); biodegradable nanocapsules; and bioadhesive microspheres, or by proteinaceous vectors (International Application Publication No. WO 00/53722). In another embodiment, the nucleic acid molecules for use in altering (suppressing or enhancing) an immune response in an immune cell and for treating an immunological disease or disorder can also be formulated or complexed with polyethyleneimine and derivatives thereof, such as polyethyleneimine-polyethyleneglycol-N-acetylgalactosamine (PEI-PEG-GAL) or polyethyleneimine-polyethyleneglycol-tri-N-acetylgalactosamine (PEI-PEG-triGAL) derivatives (see also, e.g., U.S. Patent Application Publication No. 2003/0077829).

[0336] Also provided herein are methods of manufacture for producing an agent that alters (suppresses or enhances) immunoresponsiveness of an immune cell and that is useful for treating a subject who has or who is at risk of developing an immunological disease or disorder. In one embodiment, such a method of manufacture comprises (a) identifying an agent that suppresses immunoresponsiveness of an immune cell according to methods described herein and practiced in the art. For example, identifying an agent comprises contacting (i) a candidate agent; (ii) an immune cell that expresses at least one receptor-like protein tyrosine phosphatase (RPTP) polypeptide selected from leukocyte common antigen-related protein (LAR); RPTP-σ; and RPTP-δ; and (iii) A41L, under conditions and for a time sufficient to permit interaction between the at least one RPTP polypeptide and a poxvirus polypeptide, such as A41L and 130L. Then binding of the poxvirus polypeptide to the immune cell in the presence of the candidate agent is determined and compared to binding of the poxvirus polypeptide to the immune cell in the absence of the candidate agent, wherein a decrease in binding of the poxvirus polypeptide to the immune cell in the presence of the candidate agent indicates that the candidate agent suppresses immunoresponsiveness of the immune cell. The agent is then produced according to methods known in the art for producing the agent.

[0337] The agent may be any agent described herein, such as, for example, an antibody, or antigen-binding fragment thereof; bispecific antibody, a small molecule; an aptamer; an antisense polynucleotide; a small interfering RNA (siRNA); RPTP Ig-like domain polypeptide (monomer or multimer) and a peptide-IgFc fusion polypeptide. In a particular embodiment, the agent is an antibody, or antigen-binding fragment thereof, which may be produced according to methods described herein and that are adapted for large-scale manufacture. For example, production methods include batch cell culture, which is monitored and controlled to maintain appropriate culture conditions. Purification of the antibody, or antigen-binding fragment thereof, may be performed according to methods described herein and known in the art and that comport with guidelines of domestic and foreign regulatory agencies.

[0338] The following Examples are offered for the purpose of illustrating the present invention and are not to be construed to limit the scope of this invention.

### EXAMPLES

### Example 1

### Identification of RPTPs Expressed on Immune Cells that Bind A41L

[0339] This Example describes a method for identifying cell surface polypeptides that bind to A41L.

[0340] A recombinant expression vector comprising a polynucleotide that encoded a Cowpox A41L fusion polypeptide was constructed for a tandem affinity purification (TAP) procedure (also called TAP tag procedure) (see also, e.g., Rigaut et al. Nat. Biotech. 17:1030-32 (1999); Puig et al., Methods 24:218-29 (2001); Knuesel et al. Mol. Cell. Proteomics 2:1225-33 (2003)). The construct called A41LCRFC was prepared and the fusion polypeptide expressed and isolated according to standard molecular biology and affinity purification techniques and methods. A schematic of the construct is provided in FIG. 2. The A41LCRFC construct included a nucleotide sequence that encoded a mature A41L coding sequence from Cowpox virus fused to the C-terminus of the human growth hormone leader peptide. The CRFC tandem affinity tag was fused to the C-terminus of A41L. The CRFC tag included a human influenza virus hemagglutinin peptide, the HA epitope, amino acids YPYDVDYA (SEQ ID NO:67), for which antibodies are commercially available, permitting detection of the expression fusion polypeptide by immunochemistry methods, such as fluorescence activated cell sorting (FACS) or immunoblotting. Fused to the carboxyl terminal end of the HA epitope was a Protein C-tag, amino acids EDQVDPRLIDGK (SEQ ID NO:68), which is derived form the heavy chain of human Protein C. To the carboxyl end of the Protein C-tag was fused a Human Rhinovirus HRV3C protease site, amino acids LEVLFQGP (SEQ ID NO:69), and to the carboxyl end of the HRV3C protease site was fused a mutein derivative of the Fc portion of a human IgG.

[0341] A schematic illustrating the TAP tag procedure is presented in FIG. 3. Ten μg of the A41LCRFC fusion polypeptide that was bound to Protein A was incubated with cell lysates prepared from 5×10⁶ monocytes. A variety of normal cells and tumor cell types may be used to identify cellular polypeptides that bind to or interact with A41L, including B cells and T cells (activated or non-activated), macrophages, epithelial cells, fibroblasts, and cell lines such as Raji (B cell lymphoma), THP-1 (acute monocytic leukemia), and Jurkat (T cell leukemia).

[0342] The A41LCRFC/cell lysate complexes were washed and then subjected to cleavage by the HRV3C protease, which released A41L and associated proteins. Calcium chloride (1 M) was added to the released A41L/cell lysate complexes, which were then applied to an anti-protein C-Tag affinity resin. Calcium chloride is required for the interaction of anti-C-tag and the C-tag epitope. The complexes bound to the anti-protein C-Tag affinity resin were washed in a buffer containing calcium chloride and then eluted by calcium chelation using EGTA. The subsequent eluent was digested with trypsin and the digested A41l complexes were subjected to direct tandem mass spectrometry to identify A41L and its associated proteins.

[0343] The sequences of the trypsin-generated peptides were identified by mass spectrometry. The peptides were identified as portions of the receptor-like protein tyrosine phosphatases, LAR, RPTP-σ, and RPTP-δ as shown in FIGS. 4A, 4B, and 4C, respectively.

### Example 2

### Preparation of A41L-Fc Fusion Polypeptides

[0344] This example describes preparation of recombinant expression vectors for expression of an A41L-Fc fusion polypeptide and an A41L-mutein Fc fusion polypeptide.

[0345] Recombinant expression vectors were prepared according to methods routinely practiced by a person skilled in the molecular biology art. A polynucleotide encoding A41L-Fc and a polynucleotide encoding A41L-mutein Fc were cloned into the multiple cloning site of the vector, pDC409 (see, e.g., U.S. Pat. No. 6,512,095 and U.S. Pat. No. 6,680,840, and references cited therein). The amino acid sequence of the A41L-Fc polypeptide is set forth in SEQ ID NO:74, and the amino acid sequence of the A41L-mutein Fc polypeptide is set forth in SEQ ID NO:73 (see FIG. 5). The nucleotide sequence that encodes the mutein Fc (human IgG1) polypeptide (SEQ ID NO:77) is set forth in SEQ ID NO:78. Ten to twenty micrograms of each expression plasmid were transfected into HEK293T cells or COS-7 cells (American Type Tissue Collection (ATCC), Manassas, Va.) that were grown in 10 cm diameter standard tissue culture plates to approximately 80% confluency. Transfection was performed using Lipofectamine™ Plus™ (Invitrogen Corp., Carlsbad, Calif.). The transfected cells were cultured for 48 hours, and then supernatant from the cell cultures was harvested. The A41L fusion proteins were purified by Protein A sepharose affinity chromatography according to standard procedures.

### Example 3

### Identification of RPTPs Expressed on Immune Cells That Bind Yaba-Like Disease Virus 130L

[0346] This Example describes a method for identifying cell surface polypeptides that bind to 130L.

[0347] A recombinant expression vector comprising a polynucleotide that encoded A recombinant expression vector comprising a polynucleotide that encodes a 130L fusion polypeptide was constructed for a tandem affinity purification (TAP) procedure (also called TAP tag procedure) as described in Example 1. The construct was prepared and the fusion polypeptide expressed and isolated according to standard molecular biology and affinity purification techniques and methods.

[0348] The 130L tandem affinity tag construct included a nucleotide sequence that encodes a mature 130L amino acid sequence from YLDV, which was fused to a nucleotide sequence that encodes the C-terminus of the human growth hormone signal peptide amino acid sequence (MATGSRTSLLLAFGLLCLPWLQEGSA (SEQ ID NO:153) (i.e., the 5′ end of the nucleotide sequence encoding 130L is fused to the 3′ end of the nucleotide sequence encoding the signal peptide).

[0349] The tandem affinity tag was fused to the C-terminus of 130L. The tag included a human influenza virus hemagglutinin peptide, the HA epitope, amino acids YPYDVDYA (SEQ ID NO:141), for which antibodies are commercially available, permitting detection of the expression fusion polypeptide by immunochemistry methods, such as fluorescence activated cell sorting (FACS) or immunoblotting. Fused to the carboxyl terminal end of the HA epitope was a Protein C-tag, amino acids EDQVDPRLIDGK (SEQ ID NO:142), which is derived from the heavy chain of human Protein C. To the carboxyl end of the Protein C-tag was fused a Human Rhinovirus HRV3C protease site, amino acids LEVLFQGP (SEQ ID NO:143), and to the carboxyl end of the HRV3C protease site is fused a mutein derivative of the Fc portion of a human IgG (e.g., SEQ ID NO:146).

[0350] Ten μg of the recombinantly expressed 130L fusion polypeptide was permitted to bind to a Protein A affinity matrix. The 130L fusion polypeptide that was bound to Protein A was incubated with cell lysates prepared from 5×10⁶ monocytes. A variety of normal cells and tumor cell types may be used to identify cellular polypeptides that bind to or interact with 130L, including B cells and T cells (activated or non-activated), macrophages, epithelial cells, fibroblasts, and cell lines such as Raji (B cell lymphoma), THP-1 (acute monocytic leukemia), and Jurkat (T cell leukemia).

[0351] The 130L fusion polypeptide/cell lysate complexes were washed and then subjected to cleavage by the HRV3C protease, which releases 130L and associated proteins. Calcium chloride (1 M) was added to the released 130L/cell lysate complexes, which were then applied to an anti-protein C-Tag affinity resin. Calcium chloride is required for the interaction of anti-C-tag and the C-tag epitope. The complexes that bind to the anti-protein C-Tag affinity resin were washed in a buffer containing calcium chloride and then eluted by calcium chelation using EGTA. The subsequent eluent was digested with trypsin and the digested 130L complexes were subjected to direct tandem mass spectrometry to identify 130L and its associated proteins.

[0352] The sequences of the trypsin-generated peptides were identified by mass spectrometry. The peptides were identified as portions of the receptor-like protein tyrosine phosphatases, LAR, RPTP-σ, and RPTP-δ as shown in FIGS. 7A, 7B, and 7C, respectively.

### Example 4

### Induction of IFN-Gamma in Non-Adherent PBMCs by an LAR (Ig Domains)-Fc Fusion Protein

[0353] This Example describes production of IFN-γ in peripheral blood mononuclear cells (PBMCs) in the presence and absence of heterologous donor cells.

[0354] A recombinant expression vector for expression of the LAR-Fc fusion protein was prepared according to methods routinely practiced by a person skilled in the molecular biology art. A nucleotide sequence encoding the first immunoglobulin-like domain (Ig-1), the second immunoglobulin-like domain (Ig-2), and the third immunoglobulin-like domain (Ig-3) of LAR was fused in frame to a nucleotide sequence that encoded an Fc mutein polypeptide. The Fc mutein polypeptide was derived from a human IgG1 immunoglobulin. The expression construct was transfected into cells and the expressed fusion polypeptide was isolated from the cell supernatants by Protein A affinity chromatography.

[0355] Human PBMCs were isolated from freshly drawn whole blood according to standard methods in the art. The PBMCs were enriched for non-adherent PBMC by placing the PBMCs in a tissue culture flask in RPMI containing 2% human serum for 2 hours and then gently removing the cell culture supernatant containing the nonadherent cells. The non-adherent cells (2×10⁵) were then cultured alone or in a mixed lymphocyte reaction with 10⁴ monocyte-derived dendritic cells from each of two heterologous donors (Do476 and Do495) at 0.8, 4, 20, and 100 μg/ml LAR-Fc or human IgG. After 18 hours, IFN-γ production by the non-adherent PBMC was determined by measuring. The concentration of IFN-γ in the cell supernatants was determined by ELISA (DuoSet ELISA Human IFN-γ, Cat. No. D6285, R & D Systems, Minneapolis, Minn.). As shown in FIG. 8, the LAR-Fc fusion protein enhanced the secretion of IFN-γ by non-adherent PBMC in the mixed lymphocyte reaction (FIGS. 8B and 8C). In addition, the non-adherent PBMC treated with LAR-Fc produced IFN-γ in the absence of an antigenic stimuli (FIG. 8A).

### Example 5

### Gel Filtration Chromatography of LAR (Ig Domains )-Fc Fusion Protein

[0356] This Example describes size exclusion chromatograph of the LAR Ig1-Ig2-Ig3-Fc (LAR-Fc) fusion polypeptide.

[0357] The LAR-Fc fusion polypeptide was prepared as described in Example 4. The fusion polypeptide was then analyzed by HPLC using a gel filtration column to obtain an estimated molecular weight of the fusion polypeptide. The elution profile is presented in FIG. 9. The apparent molecular weight of the polypeptide was determined by comparing the time of elution (minutes) with elution times of standardized molecular weight marker polypeptides. The estimated molecular weight according to the gel filtration method was approximately 260,000 Daltons. The LAR-Fc fusion polypeptide is expected to form a dimer by virtue of the interaction between two Fc polypeptides, and the calculated molecular weight of is 140,000 Daltons. These data suggest that the Stoke's radius of the fusion polypeptide is greater than predicted if the fusion polypeptide dimer had a globular structure. Without wishing to be bound by theory, Ig domains of each of two of the LAR Fc fusion polypeptides may interact with each other to form a dimeric structure, independent and different from the interaction between the Fc portions of two fusion polypeptides.

### Example 6

### Interaction Between A41L and LAR Ig Domains

[0358] This Example describes interaction between A41L and the immunoglobulin-like domains of LAR.

[0359] Recombinant expression vectors for expression of LAR-Fc fusion polypeptides were prepared using standard molecular biology techniques and as described in Example 2. The fusion polypeptides included TAP-Fc fusion polypeptides: a fusion polypeptide with the first, second, and third immunoglobulin-like domains with TAP sequences, which included a human IgG Fc polypeptide sequence (LAR Ig1-2-3-tapFC); a fusion polypeptide of the first immunoglobulin-like domain of LAR fused to TAP-Fc (LAR Ig1-tapFC); and a fusion polypeptide of the first and second immunoglobulin-like domains fused to TAP-Fc (LAR Ig1-Ig2-tapFC). The TAP constructs were expressed in 293-T17 cells. Cells that were transfected with this expression vector encoding LAR Ig1-Ig2-tapFC did not express the fusion polypeptide. Also included was a purified LAR Ig1-Ig2-Ig3-Fc fusion polypeptide and a P35-FC polypeptide (non-RPTP, non-A41L polypeptide control).

[0360] Immunoprecipitation reactions were performed. Cells were transfected with recombinant expression constructs encoding each of the TAP-Fc fusion polypeptides described above, cultured, and the cell supernatants collected. The supernatants were combined with purified A41L polypeptide (monomer) to which protein A conjugated beads were added. The P35-FC and LAR Ig1-Ig2-Ig3-Fc fusion polypeptide, included as controls, were purified polypeptides and incubated with purified A41L. Then the fusion polypeptides were isolated from the immunoprecipitates and subjected to SDS-PAGE. The presence of A41L bound to the LAR fusion polypeptides was analyzed by immunoblotting. The results are presented in FIG. 10. A41L bound to the LAR fusion polypeptides that included all three immunoglobulin-like domains but did not bind to the LAR Ig1-tapFC fusion polypeptide.

[0361] From the foregoing it will be appreciated that, although specific embodiments of the invention have been described herein for purposes of illustration, various modifications may be made without deviating from the spirit and scope of the invention. Those skilled in the art will recognize, or be able to ascertain, using no more than routine experimentation, many equivalents to the specific embodiments of the invention described herein. Such equivalents are intended to be encompassed by the following claims.

The application's sequence listing, which the Patent Office published only in electronic form, follows.

SEQUENCE LISTING (157 sequences)

SEQ ID NO: 1 - protein, 218 aa, Variola major virus, strain Harvey
MYSLVFVILMCIPFSFQTVYDDKSVCDSDNKEYMGIEVYVEATLDEPLRQTTCESEIHKYGASVSNGGLNISVDLLNCFLNFHTVGVYTNRDTVYAKFASLDPWTMEPINSMTYDDLVKLTEECIVDIYLKCEVDKTKDFIKTNGNRLKPRDFKTVPPNVGSIIELQSDYCVNDVTAYVKIYDECGNIKQHSIPTLRDYFTTTNGQPRKILKKKFDNC

SEQ ID NO: 2 - protein, 218 aa, Variola virus, strain India-1967
MYSLVFVILMCIPFSFQTVYDDKSVCDSDNKEYMGIEVYVEATLDEPLRQTTCESEIHKYGASVSNGGLNISVDLLNCFLNFHTVGVYTNRDTVYAKFTSLDPWTMEPINSMTYDDLVKLTEECIVDIYLKCEVDKTKDFIKTNGNRLKPRDFKTVPPNVGSIIELQSDYCVNDVTAYVKIYDECGNIKQHSIPTLRDYFTTTNGQPRKILKKKFDNC

SEQ ID NO: 3 - protein, 218 aa, Variola minor virus, strain Garcia-1966
MYSLVFVILMCIPFSFQTVYDDKSVCDSDNKEYMGIEVYVEATLDEPLRQTTCESEIHKYGASVSNGGLNISVDLLNCFLNFHTVGVYTNRDTVYAKFASLDPWTMEPINSMTYDDLVKLTEECIVDIYLKCEVDKTKDFIKTNGNRLKPRDFKTVPPNVGSIIELQSDYCVNDVTAYVKIYNECGNIKQHSIPTLRDYFTTTNGQPRKILKKKFDNC

SEQ ID NO: 4 - protein, 219 aa, Vaccinia virus, strain WR
MYSLVFVILMCIPFSFQTVYDDKSVCDSDNKEYMGIEVYVEATLDEPLRQTTCESKIHKYGASVSNGGLNISVDLLNCFLNFHTVGVYTNRDTVYAKFASLDPWTTEPINSMTHDDLVKLTEECIVDIYLKCEVDKTKDFMKTNGNRLKPRDFKTVPPSNVGSMIELQSDYCVNDVTTYVKIYDECGNIKQHSIPTLRDYFTTKNGQPRKILKKKFDNC

SEQ ID NO: 5 - protein, 219 aa, Vaccinia virus, strain Tian Tan
MYSLLFIILMCIPFSFQTVYDDKSVCDSDNKEYMGIEVYVEATLDEPLRQTTCESEIHKYGASVSNGGLNISVDLLNCFLNFHTVGVYTNRDTVYAKFASLDPWTTEPINSMTHDDLVKLTEECIVDIYLKCEVDKTKDFMKTNGNRLKPRDFKTVPPSDVGSMIELQSDYCVNDVTAYVKIYDECGNIKQHSIPTLRDYFTTKNGQPRKILKKKFDNC

SEQ ID NO: 6 - protein, 219 aa, Vaccinia virus, strain Ankara
MYSLLFIILMCIPFSFQTVYDDKSVCDSDNKEYMGIEVYVEATLDEHLRQTTCESEIHKYGASVSNGGLNISVDLLNCFLNFHTVGVYTNRDTVYAKFASLDPWTTEPINSMTHDDLVKLTEECIVDIYLKCEVDKTKDFMKTNGNRLKPRDFKTVPPSDVGSMIELQSDYCVNDVTAYVKIYDECGNIKQHSIPTLRDYFTTKNGQPRKILKKKFDNC

SEQ ID NO: 7 - protein, 219 aa, Vaccinia virus, strain Copenhagen; identical to SEQ ID NO: 5

SEQ ID NO: 8 - protein, 218 aa, Cowpox Virus, Strain Brighton Red
MYSLFIILMGLPFSFQTSEPAYDKSVCDSNNKEYMGIEVYVEATLDEPLRQTTCESEIHKYGASVSNGGLNISVDLLNCFLNFHTVGVYTNRDTVYAKFASLDPSTEPINSMTHDDLVKLTEECIVDIYLKCEVDKTKDFMKNGNRLKPRDFKTVPPSNVGSMIELQSDYCVEDVTAYVKIYDECGNIKQHSIPTLRDYFTTKNGQPRKILKKKFDSC

SEQ ID NO: 9 - DNA, 654 bp, Cowpox Virus, Strain Brighton Red
atgtactcattatttattattttgatgggtctaccatttagttttcaaacaagtgaaccagcgtatgataaatcggtatgcgattctaacaataaagaatatatgggaatagaagtttatgtagaagcaacgctagacgaacccctcagacaaacaacgtgtgaatccgaaatccataaatatggtgcatctgtatcaaacggaggattaaatatttctgttgatctattaaactgttttcttaattttcatacagttggtgtatacactaatcgcgataccgtatacgcgaagtttgctagtttggatccatctacggaacctataaattctatgacccatgacgatctagtaaaattaacagaagaatgtatagtggacatttatttaaaatgtgaagtggataaaacaaaggatttcatgaaaaacggcaatagattaaaaccaagagactttaaaactgttcctccttctaatgtaggaagtatgatcgaactacagtctgactattgcgtagaagatgtgactgcatacgtcaaaatatacgatgagtgcggaaacattaaacagcattccattccaacactacgagattattttaccaccaagaatggtcaaccacgtaaaatattaaagaaaaaatttgatagttgt

SEQ ID NO: 10 - protein, 219 aa, Vaccinia virus; identical to SEQ ID NO: 5

SEQ ID NO: 11 - protein, 277 aa, Variola virus
MLRVRILLIYLCTFVVITSTKTIEYTACNDTIIIPCTIDNPTKYIRWKLDNHNILTYNKTSKTIILSKWHTSAKLHSLSDNDVSLIIKYKDILPGTYTCEDNTGIKSTVKLVQRHTNWFNDHHTMLMFIFTGITLFLLFLEIAYTSISVVFSTNLGILQVFGCIIAMIELCGAFLFYPSMFTLRHIIGLLMMTLPSIFLIITKVFSFWLLCKLSCAVHLIIYYQLAGYILTVLGLGLSLKECVDGTLLLSGLGTIMVSEHFSLLFLVCFPSTQRDYY

SEQ ID NO: 12 - protein, 277 aa, Variola virus; identical to SEQ ID NO: 11

SEQ ID NO: 13 - protein, 221 aa, Monkeypox virus
MYLLFIILMYLLPFSFQTSEPAYDKSVCDSDNKEYMGIEVYVEATLDEPLRQTTCESEIHKYGASVSNGGLNISVDLLNCFLNFHTVGVYTNRDTVYAKFASLDPWTTEPINSMTYDDLVKLTEECIVDIYLKCEVDKTKDFMKTNDNRLKPRDFKTVPPSNVGSMIELQSDYCVNDVTAYVKIYDECGNIKQHSIPTLRDYFTTKNGQPRKILKKKIDNC

SEQ ID NO: 14 - protein, 218 aa, Variola virus; identical to SEQ ID NO: 2

SEQ ID NO: 15 - protein, 219 aa, Vaccinia virus (strain WR); identical to SEQ ID NO: 4

SEQ ID NO: 16 - protein, 219 aa, Vaccinia virus (strain Copenhagen); identical to SEQ ID NO: 5

SEQ ID NO: 17 - protein, 219 aa, Vaccinia virus; identical to SEQ ID NO: 6

SEQ ID NO: 18 - protein, 219 aa, Camelpox virus
MYSLVFVILMCIPFSFQTVYDDKSVCDSDNKEYMGIEVYVEATLDEPLRQTTCESEIHKYGASVSDGGLNISVDLLNCFVNLNTVGVYTNRDTVYAKFASLDPWTMEPINSMTHDDLVKLTEECIVDIYLKCEVDKTKDFMKTNGNRLKPRDFKTVPPSNIGSIIELQSDYCVNDVTVYVKIYDACGNIKQHSIPTLRDYFTTKNGQPRKILKKKFDNC

SEQ ID NO: 19 - protein, 277 aa, Camelpox virus
MLRVRILLIYLCTFVVITATKTIEYMACNDTIIIPCTIDNPTKYIRWKLDNHDILTYNKTSKTTILSKWHTSAKLHSLSDNDVSLIIEYKDMLPGTYTCEDNTGIKSTVKLVQRHTNWFNDHHTMLMFIFTGITLFLLFLEIAYTSTSVVFSTNLGILQVFGCIIAMIELCGAFLFYPSMFTLRHIIGLLMMTLPSIFLIITKVFSFWLLCKLSCAVHLIIYYQLAGYILTVLGLGLSLKECVDGTLLLSGLGTIMVSEHFSLLFLVCFPSTQRDYY

SEQ ID NO: 20 - protein, 219 aa, Camelpox virus M-96; identical to SEQ ID NO: 18

SEQ ID NO: 21 - protein, 277 aa, Camelpox virus M-96; identical to SEQ ID NO: 19

SEQ ID NO: 22 - protein, 1445 aa, Homo sapiens
MRRLLEPCWWILFLKITSSVLHYVVCFPALTEGYVGALHENRHGSAVQIRRRKASGDPYWAYSGAYGPEHWVTSSVSCGSRHQSPIDILDQYARVGEEYQELQLDGFDNESSNKTWMKNTGKTVAILLKDDYFVSGAGLPGRFKAEKVEFHWGHSNGSAGSEHSINGRRFPVEMQIFFYNPDDFDSFQTAISENRIIGAMAIFFQVSPRDNSALDPIIHGLKGVVHHEKETFLDPFVLRDLLPASLGSYYRYTGSLTTPPCSEIVEWIVFRRPVPISYHQLEAFYSIFTTEQQDHVKSVEYLRNNFRPQQRLHDRVVSKSAVRDSWNHDMTDFLENPLGTEASKVCSSPPIHMKVQPLNQTALQVSWSQPETIYHPPIMNYMISYSWTKNEDEKEKTFTKDSDKDLKATISHVSPDSLYLFRVQAVCRNDMRSDFSQTMLFQANTTRIFQGTRIVKTGVPTASPASSADMAPISSGSSTWTSSGIPFSFVSMATGMGPSSSGSQATVASVVTSTLLAGLGFGGGGISSFPSTVWPTRLPTAASASKQAARPVLATTEALASPGPDGDSSPTKDGEGTEEGEKDEKSESEDGEREHEEDGEKDSEKKEKSGVTHAAEERNQTEPSPTPSSPNRTAEGGHQTIPGHEQDHTAVPTDQTGGRRDAGPGLDPDMVTSTQVPPTATEEQYAGSDPKRPEMPSKKPMSRGDRFSEDSRFITVNPAEKNTSGMISRPAPGRMEWIIPLIVVSALTFVCLILLIAVLVYWRGCNKIKSKGFPRRFREVPSSGERGEKGSRKCFQTAHFYVEDSSSPRVVPNESIPIIPIPDDMEAIPVKQFVKHIGELYSNNQHGFSEDFEEVQRCTADMNITAEHSNHPENKHKNRYINILAYDHSRVKLRPLPGKDSKHSDYINANYVDGYNKAKAYIATQGPLKSTFEDFWRMIWEQNTGIIVMITNLVEKGRRKCDQYWPTENSEEYGNIIVTLKSTKIHACYTVRRFSIRNTKVKKGQKGNPKGRQNERVVIQYHYTQWPDMGVPEYALPVLTFVRRSSAARMPETGPVLVHCSAGVGRTGTYIVIDSMLQQIKDKSTVNVLGFLKHIRTQRNYLVQTEEQYIFIHDALLEAILGKETEVSSNQLHSYVNSILIPGVGGKTRLEKQFKLVTQCNAKYVECFSAQKECNKEKNRNSSVVPSERARVGLAPLPGMKGTDYINASYIMGYYRSNEFIITQHPLPHTTKDFWRMIWDHNAQIIVMLPDNQSLAEDEFVYWPSREESMNCEAFTVTLISKDRLCLSNEEQIIIHDFILEATQDDYVLEVRHFQCPKWPNPDAPISSTFELINVIKEEALTRDGPTIVHDEYGAVSAGMLCALTTLSQQLENENAVDVFQVAKMINLMRPGVFTDIEQYQFIYKARLSLVSTKENGNGPMTVDKNGAVLIADESDPAESMESLV

SEQ ID NO: 23 - DNA, 7718 bp, Homo sapiens
cgggagcggcgggagcggtggcggcggcagaggcggcggctccagcttcggctccggctcgggctcgggctccggctccggctccggctccggctccagctcgggtggcggtggcgggagcgggaccaggtggaggcggcggcggcagaggagtgggagcagcggccctagcggcttgcggggggacatgcggaccgacggcccctggataggcggaaggagtggaggccctggtgcccggcccttggtgctgagtatccagcaagagtgaccggggtgaagaagcaaagactcggttgattgtcctgggctgtggctggctgtggagctagagccctggatggcccctgagccagccccagggaggacgatggtgccccttgtgcctgcactggtgatgcttggtttggtggcaggcgcccatggtgacagcaaacctgtcttcattaaagtccctgaggaccagactgggctgtcaggaggggtagcctccttcgtgtgccaagctacaggagaacccaagccgcgcatcacatggatgaagaaggggaagaaagtcagctcccagcgcttcgaggtcattgagtttgatgatggggcagggtcagtgcttcggatccagccattgcgggtgcagcgagatgaagccatctatgagtgtacagctactaacagcctgggtgagatcaacactagtgccaagctctcagtgctcgaagaggaacagctgccccctgggttcccttccatcgacatggggcctcagctgaaggtggtggagaaggcacgcacagccaccatgctatgtgccgcaggcggaaatccagaccctgagatttcttggttcaaggacttccttcctgtagaccctgccacgagcaacggccgcatcaagcagctgcgttcaggtgccttgcagatagagagcagtgaggaatccgaccaaggcaagtacgagtgtgtggcgaccaactcggcaggcacacgttactcagcccctgcgaacctgtatgtgcgagtgcgccgcgtggctcctcgtttctccatccctcccagcagccaggaggtgatgccaggcggcagcgtgaacctgacatgcgtggcagtgggtgcacccatgccctacgtgaagtggatgatgggggccgaggagctcaccaaggaggatgagatgccagttggccgcaacgtcctggagctcagcaatgtcgtacgctctgccaactacacctgtgtggccatctcctcgctgggcatgatcgaggccacagcccaggtcacagtgaaagctcttccaaagcctccgattgatcttgtggtgacagagacaactgccaccagtgtcaccctcacctgggactctgggaactcggagcctgtaacctactatggcatccagtaccgcgcagcgggcacggagggcccctttcaggaggtggatggtgtggccaccacccgctacagcattggcggcctcagccctttctcggaatatgccttccgcgtgctggcggtgaacagcatcgggcgagggccgcccagcgaggcagtgcgggcacgcacgggagaacaggcgccctccagcccaccgcgccgcgtgcaggcacgcatgctgagcgccagcaccatgctggtgcagtgggagcctcccgaggagcccaacggcctggtgcggggataccgcgtctactatactccggactcccgccgccccccgaacgcctggcacaagcacaacaccgacgcggggctcctcacgaccgtgggcagcctgctgcctggcatcacctacagcctgcgcgtgcttgccttcaccgccgtgggcgatggccctcccagccccaccatccaggtcaagacgcagcagggagtgcctgcccagcccgcggacttccaggccgaggtggagtcggacaccaggatccagctctcgtggctgctgccccctcaggagcggatcatcatgtatgaactggtgtactgggcggcagaggacgaagaccaacagcacaaggtcaccttcgacccaacctcctcctacacactagaggacctgaagcctgacacactctaccgcttccagctggctgcacgctcggatatgggggtgggcgtcttcacccccaccattgaggcccgcacagcccagtccaccccctccgcccctccccagaaggtgatgtgtgtgagcatgggctccaccacggtccgggtaagttgggtcccgccgcctgccgacagccgcaacggcgttatcacccagtactccgtggcccacgaggcggtggacggcgaggaccgcgggcggcatgtggtggatggcatcagccgtgagcactccagctgggacctggtgggcctggagaagtggacggagtaccgggtgtgggtgcgggcacacacagacgtgggccccggccccgagagcagcccggtgctggtgcgcaccgatgaggacgtgcccagcgggcctccgcggaaggtggaggtggagccactgaactccactgctgtgcatgtctactggaagctgcctgtccccagcaagcagcatggccagatccgcggctaccaggtcacctacgtgcggctggagaatggcgagccccgtggactccccatcatccaagacgtcatgctagccgaggcccagtggcggccagaggagtccgaggactatgaaaccactatcagcggcctgaccccggagaccacctactccgttactgttgctgcctataccaccaagggggatggtgcccgcagcaagcccaaaattgtcactacaacaggtgcagtcccaggccggcccaccatgatgatcagcaccacggccatgaacactgcgctgctccagtggcacccacccaaggaactgcctggcgagctgctgggctaccggctgcagtactgccgggccgacgaggcgcggcccaacaccatagatttcggcaaggatgaccagcacttcacagtcaccggcctgcacaaggggaccacctacatcttccggcttgctgccaagaaccgggctggcttgggtgaggagttcgagaaggagatcaggacccccgaggacctgcccagcggcttcccccaaaacctgcatgtgacaggactgaccacgtctaccacagaactggcctgggacccgccagtgctggcggagaggaacgggcgcatcatcagctacaccgtggtgttccgagacatcaacagccaacaggagctgcagaacatcacgacagacacccgctttacccttactggcctcaagccagacaccacttacgacatcaaggtccgcgcatggaccagcaaaggctctggcccactcagccccagcatccagtcccggaccatgccggtggagcaagtgtttgccaagaacttccgggtggcggctgcaatgaagacgtctgtgctgctcagctgggaggttcccgactcctataagtcagctgtgccctttaagattctgtacaatgggcagagtgtggaggtggacgggcactcgatgcggaagctgatcgcagacctgcagcccaacacagagtactcgtttgtgctgatgaaccgtggcagcagcgcagggggcctgcagcacctggtgtccatccgcacagcccccgacctcctgcctcacaagccgctgcctgcctctgcctacatagaggacggccgcttcgatctctccatgccccatgtgcaagacccctcgcttgtcaggtggttctacattgttgtggtacccattgaccgtgtgggcgggagcatgctgacgccaaggtggagcacacccgaggaactggagctggacgagcttctagaagccatcgagcaaggcggagaggagcagcggcggcggcggcggcaggcagaacgtctgaagccatatgtggctgctcaactggatgtgctcccggagacctttaccttgggggacaagaagaactaccggggcttctacaaccggcccctgtctccggacttgagctaccagtgctttgtgcttgcctccttgaaggaacccatggaccagaagcgctatgcctccagcccctactcggatgagatcgtggtccaggtgacaccagcccagcagcaggaggagccggagatgctgtgggtgacgggtcccgtgctggcagtcatcctcatcatcctcattgtcatcgccatcctcttgttcaaaaggaaaaggacccactctccgtcctctaaggatgagcagtcgatcggactgaaggactccttgctggcccactcctctgaccctgtggagatgcggaggctcaactaccagaccccaggtatgcgagaccacccacccatccccatcaccgacctggcggacaacatcgagcgcctcaaagccaacgatggcctcaagttctcccaggagtatgagtccatcgaccctggacagcagttcacgtgggagaattcaaacctggaggtgaacaagcccaagaaccgctatgcgaatgtcatcgcctacgaccactctcgagtcatccttacctctatcgatggcgtccccgggagtgactacatcaatgccaactacatcgatggctaccgcaagcagaatgcctacatcgccacgcagggccccctgcccgagaccatgggcgatttctggagaatggtgtgggaacagcgcacggccactgtggtcatgatgacacggctggaggagaagtcccgggtaaaatgtgatcagtactggccagcccgtggcaccgagacctgtggccttattcaggtgaccctgttggacacagtggagctggccacatacactgtgcgcaccttcgcactccacaagagtggctccagtgagaagcgtgagctgcgtcagtttcagttcatggcctggccagaccatggagttcctgagtacccaactcccatcctggccttcctacgacgggtcaaggcctgcaaccccctagacgcagggcccatggtggtgcactgcagcgcgggcgtgggccgcaccggctgcttcatcgtgattgatgccatgttggagcggatgaagcacgagaagacggtggacatctatggccacgtgacctgcatgcgatcacagaggaactacatggtgcagacggaggaccagtacgtgttcatccatgaggcgctgctggaggctgccacgtgcggccacacagaggtgcctgcccgcaacctgtatgcccacatccagaagctgggccaagtgcctccaggggagagtgtgaccgccatggagctcgagttcaagttgctggccagctccaaggcccacacgtcccgcttcatcagcgccaacctgccctgcaacaagttcaagaaccggctggtgaacatcatgccctacgaattgacccgtgtgtgtctgcagcccatccgtggtgtggagggctctgactacatcaatgccagcttcctggatggttatagacagcagaaggcctacatagctacacaggggcctctggcagagagcaccgaggacttctggcgcatgctatgggagcacaattccaccatcatcgtcatgctgaccaagcttcgggagatgggcagggagaaatgccaccagtactggccagcagagcgctctgctcgctaccagtactttgttgttgacccgatggctgagtacaacatgccccagtatatcctgcgtgagttcaaggtcacggatgcccgggatgggcagtcaaggacaatccggcagttccagttcacagactggccagagcagggcgtgcccaagacaggcgagggattcattgacttcatcgggcaggtgcataagaccaaggagcagtttggacaggatgggcctatcacggtgcactgcagtgctggcgtgggccgcaccggggtgttcatcactctgagcatcgtcctggagcgcatgcgctatgagggcgtggtcgacatgtttcagaccgtgaagaccctgcgtacacagcgtcctgccatggtgcagacagaggaccagtatcagctgtgctaccgtgcggccctggagtacctcggcagctttgaccactatgcaacgtaactaccgctcccctctcctccgccacccccgccgtggggctccggaggggacccagctcctctgagccataccgaccatcgtccagccctcctacgcagatgctgtcactggcagagcacagcccacggggatcacagcgtttcaggaacgttgccacaccaatcagagagcctagaacatccctgggcaagtggatggcccagcaggcaggcactgtggcccttctgtccaccagacccacctggagcccgcttcaagctctctgttgcgctcccgcatttctcatgcttcttctcatggggtggggttggggcaaagcctcctttttaatacattaagtggggtagactgagggattttagcctcttccctctgatttttcctttcgcgaatccgtatctgcagaatgggccactgtaggggttggggtttattttgttttgttttttttttttttttgtatgacttctgctgaaggacagaacattgccttcctcgtgcagagctggggctgccagcctgagcggaggctcggccgtgggccgggaggcagtgctgatccggctgctcctccagcccttcagacgagatcctgtttcagctaaatgcagggaaactcaatgtttttttaagttttgttttccctttaaagcctttttttaggccacattgacagtggtgggcggggagaagatagggaacactcatccctggtcgtctatcccagtgtgtgtttaacattcacagcccagaaccacagatgtgtctgggagagcctggcaaggcattcctcatcaccatcgtgtttgcaaaggttaaaacaaaaacaaaaaaccacaaaaataaaaaacaaaaaaaacaaaaaacccaaaaaaaaaaaaaaaaagagtcagcccttggcttctgcttcaaaccctcaagaggggaagcaactccgtgtgcctggggttcccgagggagctgctggctgacctgggcccacagagcctggctttggtccccagcattgcagtatggtgtggtgtttgtaggctgtggggtctggctgtgtggccaaggtgaatagcacaggttagggtgtgtgccacaccccatgcacctcagggccaagcgggggcgtggctggcctttcaggtccaggccagtgggcctggtagcacatgtctgtcctcagagcaggggccagatgattttcctccctggtttgcagctgttttcaaagcccccgataatcgctcttttccactccaagatgccctcataaaccaatgtggcaagactactggacttctatcaatggtactctaatcagtccttattatcccagcttgctgaggggcagggagagcgcctcttcctctgggcagcgctatctagataggtaagtgggggcggggaagggtgcatagctgttttagctgagggacgtggtgccgacgtccccaaacctagctaggctaagtcaagatcaacattccagggttggtaatgttggatgatgaaacattcatttttaccttgtggatgctagtgctgtagagttcactgttgtacacagtctgttttctatttgttaagaaaaactacagcatcattgcataattcttgatggtaataaatttgaataatcagatttcttacaaaaaaaaaaaaa

SEQ ID NO: 24 - protein, 1898 aa, Homo sapiens [sequence omitted]

SEQ ID NO: 25 - protein, 1907 aa, Homo sapiens
MAPEPAPGRTMVPLVPALVMLGLVAGAHGDSKPVFIKVPEDQTGLSGGVASFVCQATGEPKPRITWMKKGKKVSSQRFEVIEFDDGAGSVLRIQPLRVQRDEAIYECTATNSLGEINTSAKLSVLEEEQLPPGFPSIDMGPQLKVVEKARTATMLCAAGGNPDPEISWFKDFLPVDPATSNGRIKQLRSGALQIESSEESDQGKYECVATNSAGTRYSAPANLYVRVRRVAPRFSIPPSSQEVMPGGSVNLTCVAVGAPMPYVKWMMGAEELTKEDEMPVGRNVLELSNVVRSANYTCVAISSLGMIEATAQVTVKALPKPPIDLVVTETTATSVTLTWDSGNSEPVTYYGIQYRAAGTEGPFQEVDGVATTRYSIGGLSPFSEYAFRVLAVNSIGRGPPSEAVRARTGEQAPSSPPRRVQARMLSASTMLVQWEPPEEPNGLVRGYRVYYTPDSRRPPNAWHKHNTDAGLLTTVGSLLPGITYSLRVLAFTAVGDGPPSPTIQVKTQQGVPAQPADFQAEVESDTRIQLSWLLPPQERIIMYELVYWAAEDEDQQHKVTFDPTSSYTLEDLKPDTLYRFQLAARSDMGVGVFTPTIEARTAQSTPSAPPQKVMCVSMGSTTVRVSWVPPPADSRNGVITQYSVAYEAVDGEDRGRHVVDGISREHSSWDLVGLEKWTEYRVWVRAHTDVGPGPESSPVLVRTDEDVPSGPPRKVEVEPLNSTAVHVYWKLPVPSKQHGQIRGYQVTYVRLENGEPRGLPIIQDVMLAEAQWRPEESEDYETTISGLTPETTYSVTVAAYTTKGDGARSKPKIVTTTGAVPGRPTMMISTTAMNTALLQWHPPKELPGELLGYRLQYCRADEARPNTIDFGKDDQHFTVTGLHKGTTYIFRLAAKNRAGLGEEFEKEIRTPEDLPSGFPQNLHVTGLTTSTTELAWDPPVLAERNGRIISYTVVFRDINSQQELQNITTDTRFTLTGLKPDTTYDIKVRAWTSKGSGPLSPSIQSRTMPVEQVFAKNFRVAAAMKTSVLLSWEVPDSYKSAVPFKILYNGQSVEVDGHSMRKLIADLQPNTEYSFVLMNRGSSAGGLQHLVSIRTAPDLLPHKPLPASAYIEDGRFDLSMPHVQDPSLVRWFYIVVVPIDRVGGSMLTPRWSTPEELELDELLEAIEQGGEEQRRRRRQAERLKPYVAAQLDVLPETFTLGDKKNYRGFYNRPLSPDLSYQCFVLASLKEPMDQKRYASSPYSDEIVVQVTPAQQQEEPEMLWVTGPVLAVILIILIVIAILLFKRKRTHSPSSKDEQSIGLKDSLLAHSSDPVEMRRLNYQTPGMRDHPPIPITDLADNIERLKANDGLKFSQEYESIDPGQQFTWENSNLEVNKPKNRYANVIAYDHSRVILTSIDGVPGSDYINANYIDGYRKQNAYIATQGPLPETMGDFWRMVWEQRTATVVMMTRLEEKSRVKCDQYWPARGTETCGLIQVTLLDTVELATYTVRTFALHKSGSSEKRELRQFQFMAWPDHGVPEYPTPILAFLRRVKACNPLDAGPMVVHCSAGVGRTGCFIVIDAMLERMKHEKTVDIYGHVTCMRSQRNYMVQTEDQYVFIHEALLEAATCGHTEVPARNLYAHIQKLGQVPPGESVTAMELEFKLLASSKAHTSRFISANLPCNKFKNRLVNIMPYELTRVCLQPIRGVEGSDYINASFLDGYRQQKAYIATQGPLAESTEDFWRMLWEHNSTIIVMLTKLREMGREKCHQYWPAERSARYQYFVVDPMAEYNMPQYILREFKVTDARDGQSRTIRQFQFTDWPEQGVPKTGEGFIDFIGQVHKTKEQFGQDGPITVHCSAGVGRTGVFITLSIVLERMRYEGVVDMFQTVKTLRTQRPAMVQTEDQYQLCYRAALEYLGSFDHYAT

SEQ ID NO: 26 - protein, 1888 aa, Homo sapiens
MVPLVPALVMLGLVAGAHGDSKPVFIKVPEDQTGLSGGVASFVCQATGEPKPRITWMKKGKKVSSQRFEVIEFDDGAGSVLRIQPLRVQRDEAIYECTATNSLGEINTSAKLSVLEEEQLPPGFPSIDMGPQLKVVEKARTATMLCAAGGNPDPEISWFKDFLPVDPATSNGRIKQLRSGALQIESSEESDQGKYECVATNSAGTRYSAPANLYVRVRRVAPRFSIPPSSQEVMPGGSVNLTCVAVGAPMPYVKWMMGAEELTKEDEMPVGRNVLELSNVVRSANYTCVAISSLGMIEATAQVTVKALPKPPIDLVVTETTATSVTLTWDSGNSEPVTYYGIQYRAAGTEGPFQEVDGVATTRYSIGGLSPFSEYAFRVLAVNSIGRGPPSEAVRARTGEQAPSSPPRRVQARMLSASTMLVQWEPPEEPNGLVRGYRVYYTPDSRRPPNAWHKHNTDAGLLTTVGSLLPGITYSLRVLAFTAVGDGPPSPTIQVKTQQGVPAQPADFQAEVESDTRIQLSWLLPPQERIIMYELVYWAAEDEDQQHKVTFDPTSSYTLEDLKPDTLYRFQLAARSDMGVGVFTPTIEARTAQSTPSAPPQKVMCVSMGSTTVRVSWVPPPADSRNGVITQYSVAHEAVDGEDRGRHVVDGISREHSSWDLVGLEKWTEYRVWVRAHTDVGPGPESSPVLVRTDEDVPSGPPRKVEVEPLNSTAVHVYWKLPVPSKQHGQIRGYQVTYVRLENGEPRGLPIIQDVMLAEAQETTISGLTPETTYSVTVAAYTTKGDGARSKPKIVTTTGAVPGRPTMMISTTAMNTALLQWHPPKELPGELLGYRLQYCRADEARPNTIDFGKDDQHFTVTGLHKGTTYIFRLAAKNRAGLGEEFEKEIRTPEDLPSGFPQNLHVTGLTTSTTELAWDPPVLAERNGRIISYTVVFRDINSQQELQNITTDTRFTLTGLKPDTTYDIKVRAWTSKGSGPLSPSIQSRTMPVEQVFAKNFRVAAAMKTSVLLSWEVPDSYKSAVPFKILYNGQSVEVDGHSMRKLIADLQPNTEYSFVLMNRGSSAGGLQHLVSIRTAPDLLPHKPLPASAYIEDGRFDLSMPHVQDPSLVRWFYIVVVPIDRVGGSMLTPRWSTPEELELDELLEAIEQGGEEQRRRRRQAERLKPYVAAQLDVLPETFTLGDKKNYRGFYNRPLSPDLSYQCFVLASLKEPMDQKRYASSPYSDEIVVQVTPAQQQEEPEMLWVTGPVLAVILIILIVIAILLFKRKRTHSPSSKDEQSIGLKDSLLAHSSDPVEMRRLNYQTPGMRDHPPIPITDLADNIERLKANDGLKFSQEYESIDPGQQFTWENSNLEVNKPKNRYANVIAYDHSRVILTSIDGVPGSDYINANYIDGYRKQNAYIATQGPLPETMGDFWRMVWEQRTATVVMMTRLEEKSRVKCDQYWPARGTETCGLIQVTLLDTVELATYTVRTFALHKSGSSEKRELRQFQFMAWPDHGVPEYPTPILAFLRRVKACNPLDAGPMVVHCSAGVGRTGCFIVIDAMLERMKHEKTVDIYGHVTCMRSQRNYMVQTEDQYVFIHEALLEAATCGHTEVPARNLYAHIQKLGQVPPGESVTAMELEFKLLASSKAHTSRFISANLPCNKFKNRLVNIMPYELTRVCLQPIRGVEGSDYINASFLDGYRQQKAYIATQGPLAESTEDFWRMLWEHNSTIIVMLTKLREMGREKCHQYWPAERSARYQYFVVDPMAEYNMPQYILREFKVTDARDGQSRTIRQFQFTDWPEQGVPKTGEGFIDFIGQVHKTKEQFGQDGPITVHCSAGVGRTGVFITLSIVLERMRYEGVVDMFQTVKTLRTQRPAMVQTEDQYQLCYRAALEYLGSFDHYAT

SEQ ID NO: 27 - DNA, 7691 bp, Homo sapiens
cgggagcggcgggagcggtggcggcggcagaggcggcggctccagcttcggctccggctcgggctcgggctccggctccggctccggctccggctccagctcgggtggcggtggcgggagcgggaccaggtggaggcggcggcggcagaggagtgggagcagcggccctagcggcttgcggggggacatgcggaccgacggcccctggataggcggaaggagtggaggccctggtgcccggcccttggtgctgagtatccagcaagagtgaccggggtgaagaagcaaagactcggttgattgtcctgggctgtggctggctgtggagctagagccctggatggcccctgagccagccccagggaggacgatggtgccccttgtgcctgcactggtgatgcttggtttggtggcaggcgcccatggtgacagcaaacctgtcttcattaaagtccctgaggaccagactgggctgtcaggaggggtagcctccttcgtgtgccaagctacaggagaacccaagccgcgcatcacatggatgaagaaggggaagaaagtcagctcccagcgcttcgaggtcattgagtttgatgatggggcagggtcagtgcttcggatccagccattgcgggtgcagcgagatgaagccatctatgagtgtacagctactaacagcctgggtgagatcaacactagtgccaagctctcagtgctcgaagaggaacagctgccccctgggttcccttccatcgacatggggcctcagctgaaggtggtggagaaggcacgcacagccaccatgctatgtgccgcaggcggaaatccagaccctgagatttcttggttcaaggacttccttcctgtagaccctgccacgagcaacggccgcatcaagcagctgcgttcaggtgccttgcagatagagagcagtgaggaatccgaccaaggcaagtacgagtgtgtggcgaccaactcggcaggcacacgttactcagcccctgcgaacctgtatgtgcgagtgcgccgcgtggctcctcgtttctccatccctcccagcagccaggaggtgatgccaggcggcagcgtgaacctgacatgcgtggcagtgggtgcacccatgccctacgtgaagtggatgatgggggccgaggagctcaccaaggaggatgagatgccagttggccgcaacgtcctggagctcagcaatgtcgtacgctctgccaactacacctgtgtggccatctcctcgctgggcatgatcgaggccacagcccaggtcacagtgaaagctcttccaaagcctccgattgatcttgtggtgacagagacaactgccaccagtgtcaccctcacctgggactctgggaactcggagcctgtaacctactatggcatccagtaccgcgcagcgggcacggagggcccctttcaggaggtggatggtgtggccaccacccgctacagcattggcggcctcagccctttctcggaatatgccttccgcgtgctggcggtgaacagcatcgggcgagggccgcccagcgaggcagtgcgggcacgcacgggagaacaggcgccctccagcccaccgcgccgcgtgcaggcacgcatgctgagcgccagcaccatgctggtgcagtgggagcctcccgaggagcccaacggcctggtgcggggataccgcgtctactatactccggactcccgccgccccccgaacgcctggcacaagcacaacaccgacgcggggctcctcacgaccgtgggcagcctgctgcctggcatcacctacagcctgcgcgtgcttgccttcaccgccgtgggcgatggccctcccagccccaccatccaggtcaagacgcagcagggagtgcctgcccagcccgcggacttccaggccgaggtggagtcggacaccaggatccagctctcgtggctgctgccccctcaggagcggatcatcatgtatgaactggtgtactgggcggcagaggacgaagaccaacagcacaaggtcaccttcgacccaacctcctcctacacactagaggacctgaagcctgacacactctaccgcttccagctggctgcacgctcggatatgggggtgggcgtcttcacccccaccattgaggcccgcacagcccagtccaccccctccgcccctccccagaaggtgatgtgtgtgagcatgggctccaccacggtccgggtaagttgggtcccgccgcctgccgacagccgcaacggcgttatcacccagtactccgtggcccacgaggcggtggacggcgaggaccgcgggcggcatgtggtggatggcatcagccgtgagcactccagctgggacctggtgggcctggagaagtggacggagtaccgggtgtgggtgcgggcacacacagacgtgggccccggccccgagagcagcccggtgctggtgcgcaccgatgaggacgtgcccagcgggcctccgcggaaggtggaggtggagccactgaactccactgctgtgcatgtctactggaagctgcctgtccccagcaagcagcatggccagatccgcggctaccaggtcacctacgtgcggctggagaatggcgagccccgtggactccccatcatccaagacgtcatgctagccgaggcccaggaaaccactatcagcggcctgaccccggagaccacctactccgttactgttgctgcctataccaccaagggggatggtgcccgcagcaagcccaaaattgtcactacaacaggtgcagtcccaggccggcccaccatgatgatcagcaccacggccatgaacactgcgctgctccagtggcacccacccaaggaactgcctggcgagctgctgggctaccggctgcagtactgccgggccgacgaggcgcggcccaacaccatagatttcggcaaggatgaccagcacttcacagtcaccggcctgcacaaggggaccacctacatcttccggcttgctgccaagaaccgggctggcttgggtgaggagttcgagaaggagatcaggacccccgaggacctgcccagcggcttcccccaaaacctgcatgtgacaggactgaccacgtctaccacagaactggcctgggacccgccagtgctggcggagaggaacgggcgcatcatcagctacaccgtggtgttccgagacatcaacagccaacaggagctgcagaacatcacgacagacacccgctttacccttactggcctcaagccagacaccacttacgacatcaaggtccgcgcatggaccagcaaaggctctggcccactcagccccagcatccagtcccggaccatgccggtggagcaagtgtttgccaagaacttccgggtggcggctgcaatgaagacgtctgtgctgctcagctgggaggttcccgactcctataagtcagctgtgccctttaagattctgtacaatgggcagagtgtggaggtggacgggcactcgatgcggaagctgatcgcagacctgcagcccaacacagagtactcgtttgtgctgatgaaccgtggcagcagcgcagggggcctgcagcacctggtgtccatccgcacagcccccgacctcctgcctcacaagccgctgcctgcctctgcctacatagaggacggccgcttcgatctctccatgccccatgtgcaagacccctcgcttgtcaggtggttctacattgttgtggtacccattgaccgtgtgggcgggagcatgctgacgccaaggtggagcacacccgaggaactggagctggacgagcttctagaagccatcgagcaaggcggagaggagcagcggcggcggcggcggcaggcagaacgtctgaagccatatgtggctgctcaactggatgtgctcccggagacctttaccttgggggacaagaagaactaccggggcttctacaaccggcccctgtctccggacttgagctaccagtgctttgtgcttgcctccttgaaggaacccatggaccagaagcgctatgcctccagcccctactcggatgagatcgtggtccaggtgacaccagcccagcagcaggaggagccggagatgctgtgggtgacgggtcccgtgctggcagtcatcctcatcatcctcattgtcatcgccatcctcttgttcaaaaggaaaaggacccactctccgtcctctaaggatgagcagtcgatcggactgaaggactccttgctggcccactcctctgaccctgtggagatgcggaggctcaactaccagaccccaggtatgcgagaccacccacccatccccatcaccgacctggcggacaacatcgagcgcctcaaagccaacgatggcctcaagttctcccaggagtatgagtccatcgaccctggacagcagttcacgtgggagaattcaaacctggaggtgaacaagcccaagaaccgctatgcgaatgtcatcgcctacgaccactctcgagtcatccttacctctatcgatggcgtccccgggagtgactacatcaatgccaactacatcgatggctaccgcaagcagaatgcctacatcgccacgcagggccccctgcccgagaccatgggcgatttctggagaatggtgtgggaacagcgcacggccactgtggtcatgatgacacggctggaggagaagtcccgggtaaaatgtgatcagtactggccagcccgtggcaccgagacctgtggccttattcaggtgaccctgttggacacagtggagctggccacatacactgtgcgcaccttcgcactccacaagagtggctccagtgagaagcgtgagctgcgtcagtttcagttcatggcctggccagaccatggagttcctgagtacccaactcccatcctggccttcctacgacgggtcaaggcctgcaaccccctagacgcagggcccatggtggtgcactgcagcgcgggcgtgggccgcaccggctgcttcatcgtgattgatgccatgttggagcggatgaagcacgagaagacggtggacatctatggccacgtgacctgcatgcgatcacagaggaactacatggtgcagacggaggaccagtacgtgttcatccatgaggcgctgctggaggctgccacgtgcggccacacagaggtgcctgcccgcaacctgtatgcccacatccagaagctgggccaagtgcctccaggggagagtgtgaccgccatggagctcgagttcaagttgctggccagctccaaggcccacacgtcccgcttcatcagcgccaacctgccctgcaacaagttcaagaaccggctggtgaacatcatgccctacgaattgacccgtgtgtgtctgcagcccatccgtggtgtggagggctctgactacatcaatgccagcttcctggatggttatagacagcagaaggcctacatagctacacaggggcctctggcagagagcaccgaggacttctggcgcatgctatgggagcacaattccaccatcatcgtcatgctgaccaagcttcgggagatgggcagggagaaatgccaccagtactggccagcagagcgctctgctcgctaccagtactttgttgttgacccgatggctgagtacaacatgccccagtatatcctgcgtgagttcaaggtcacggatgcccgggatgggcagtcaaggacaatccggcagttccagttcacagactggccagagcagggcgtgcccaagacaggcgagggattcattgacttcatcgggcaggtgcataagaccaaggagcagtttggacaggatgggcctatcacggtgcactgcagtgctggcgtgggccgcaccggggtgttcatcactctgagcatcgtcctggagcgcatgcgctatgagggcgtggtcgacatgtttcagaccgtgaagaccctgcgtacacagcgtcctgccatggtgcagacagaggaccagtatcagctgtgctaccgtgcggccctggagtacctcggcagctttgaccactatgcaacgtaactaccgctcccctctcctccgccacccccgccgtggggctccggaggggacccagctcctctgagccataccgaccatcgtccagccctcctacgcagatgctgtcactggcagagcacagcccacggggatcacagcgtttcaggaacgttgccacaccaatcagagagcctagaacatccctgggcaagtggatggcccagcaggcaggcactgtggcccttctgtccaccagacccacctggagcccgcttcaagctctctgttgcgctcccgcatttctcatgcttcttctcatggggtggggttggggcaaagcctcctttttaatacattaagtggggtagactgagggattttagcctcttccctctgatttttcctttcgcgaatccgtatctgcagaatgggccactgtaggggttggggtttattttgttttgttttttttttttttttgtatgacttctgctgaaggacagaacattgccttcctcgtgcagagctggggctgccagcctgagcggaggctcggccgtgggccgggaggcagtgctgatccggctgctcctccagcccttcagacgagatcctgtttcagctaaatgcagggaaactcaatgtttttttaagttttgttttccctttaaagcctttttttaggccacattgacagtggtgggcggggagaagatagggaacactcatccctggtcgtctatcccagtgtgtgtttaacattcacagcccagaaccacagatgtgtctgggagagcctggcaaggcattcctcatcaccatcgtgtttgcaaaggttaaaacaaaaacaaaaaaccacaaaaataaaaaacaaaaaaaacaaaaaacccaaaaaaaaaaaaaaaaagagtcagcccttggcttctgcttcaaaccctcaagaggggaagcaactccgtgtgcctggggttcccgagggagctgctggctgacctgggcccacagagcctggctttggtccccagcattgcagtatggtgtggtgtttgtaggctgtggggtctggctgtgtggccaaggtgaatagcacaggttagggtgtgtgccacaccccatgcacctcagggccaagcgggggcgtggctggcctttcaggtccaggccagtgggcctggtagcacatgtctgtcctcagagcaggggccagatgattttcctccctggtttgcagctgttttcaaagcccccgataatcgctcttttccactccaagatgccctcataaaccaatgtggcaagactactggacttctatcaatggtactctaatcagtccttattatcccagcttgctgaggggcagggagagcgcctcttcctctgggcagcgctatctagataggtaagtgggggcggggaagggtgcatagctgttttagctgagggacgtggtgccgacgtccccaaacctagctaggctaagtcaagatcaacattccagggttggtaatgttggatgatgaaacattcatttttaccttgtggatgctagtgctgtagagttcactgttgtacacagtctgttttctatttgttaagaaaaactacagcatcattgcataattcttgatggtaataaatttgaataatcagatttcttacaaaaaaaaaaaaa

SEQ ID NO: 28 - protein, 1898 aa, Homo sapiens
MAPEPAPGRTMVPLVPALVMLGLVAGAHGDSKPVFIKVPEDQTGLSGGVASFVCQATGEPKPRITWMKKGKKVSSQRFEVIEFDDGAGSVLRIQPLRVQRDEAIYECTATNSLGEINTSAKLSVLEEEQLPPGFPSIDMGPQLKVVEKARTATMLCAAGGNPDPEISWFKDFLPVDPATSNGRIKQLRSGALQIESSEESDQGKYECVATNSAGTRYSAPANLYVRVRRVAPRFSIPPSSQEVMPGGSVNLTCVAVGAPMPYVKWMMGAEELTKEDEMPVGRNVLELSNVVRSANYTCVAISSLGMIEATAQVTVKALPKPPIDLVVTETTATSVTLTWDSGNSEPVTYYGIQYRAAGTEGPFQEVDGVATTRYSIGGLSPFSEYAFRVLAVNSIGRGPPSEAVRARTGEQAPSSPPRRVQARMLSASTMLVQWEPPEEPNGLVRGYRVYYTPDSRRPPNAWHKHNTDAGLLTTVGSLLPGITYSLRVLAFTAVGDGPPSPTIQVKTQQGVPAQPADFQAEVESDTRIQLSWLLPPQERIIMYELVYWAAEDEDQQHKVTFDPTSSYTLEDLKPDTLYRFQLAARSDMGVGVFTPTIEARTAQSTPSAPPQKVMCVSMGSTTVRVSWVPPPADSRNGVITQYSVAYEAVDGEDRGRHVVDGISREHSSWDLVGLEKWTEYRVWVRAHTDVGPGPESSPVLVRTDEDVPSGPPRKVEVEPLNSTAVHVYWKLPVPSKQHGQIRGYQVTYVRLENGEPRGLPIIQDVMLAEAQETTISGLTPETTYSVTVAAYTTKGDGARSKPKIVTTTGAVPGRPTMMISTTAMNTALLQWHPPKELPGELLGYRLQYCRADEARPNTIDFGKDDQHFTVTGLHKGTTYIFRLAAKNRAGLGEEFEKEIRTPEDLPSGFPQNLHVTGLTTSTTELAWDPPVLAERNGRIISYTVVFRDINSQQELQNITTDTRFTLTGLKPDTTYDIKVRAWTSKGSGPLSPSIQSRTMPVEQVFAKNFRVAAAMKTSVLLSWEVPDSYKSAVPFKILYNGQSVEVDGHSMRKLIADLQPNTEYSFVLMNRGSSAGGLQHLVSIRTAPDLLPHKPLPASAYIEDGRFDLSMPHVQDPSLVRWFYIVVVPIDRVGGSMLTPRWSTPEELELDELLEAIEQGGEEQRRRRRQAERLKPYVAAQLDVLPETFTLGDKKNYRGFYNRPLSPDLSYQCFVLASLKEPMDQKRYASSPYSDEIVVQVTPAQQQEEPEMLWVTGPVLAVILIILIVIAILLFKRKRTHSPSSKDEQSIGLKDSLLAHSSDPVEMRRLNYQTPGMRDHPPIPITDLADNIERLKANDGLKFSQEYESIDPGQQFTWENSNLEVNKPKNRYANVIAYDHSRVILTSIDGVPGSDYINANYIDGYRKQNAYIATQGPLPETMGDFWRMVWEQRTATVVMMTRLEEKSRVKCDQYWPARGTETCGLIQVTLLDTVELATYTVRTFALHKSGSSEKRELRQFQFMAWPDHGVPEYPTPILAFLRRVKACNPLDAGPMVVHCSAGVGRTGCFIVIDAMLERMKHEKTVDIYGHVTCMRSQRNYMVQTEDQYVFIHEALLEAATCGHTEVPARNLYAHIQKLGQVPPGESVTAMELEFKLLASSKAHTSRFISANLPCNKFKNRLVNIMPYELTRVCLQPIRGVEGSDYINASFLDGYRQQKAYIATQGPLAESTEDFWRMLWEHNSTIIVMLTKLREMGREKCHQYWPAERSARYQYFVVDPMAEYNMPQYILREFKVTDARDGQSRTIRQFQFTDWPEQGVPKTGEGFIDFIGQVHKTKEQFGQDGPITVHCSAGVGRTGVFITLSIVLERMRYEGVVDMFQTVKTLRTQRPAMVQTEDQYQLCYRAALEYLGSFDHYAT

SEQ ID NO: 29 - protein, 1948 aa, Homo sapiens
MAPTWGPGMVSVVGPMGLLVVLLVGGCAAEEPPRFIKEPKDQIGVSGGVASFVCQATGDPKPRVTWNKKGKKVNSQRFETIEFDESAGAVLRIQPLRTPRDENVYECVAQNSVGEITVHAKLTVLREDQLPSGFPNIDMGPQLKVVERTRTATMLCAASGNPDPEITWFKDFLPVDPSASNGRIKQLRSETFESTPIRGALQIESSEETDQGKYECVATNSAGVRYSSPANLYVRELREVRRVAPRFSILPMSHEIMPGGNVNITCVAVGSPMPYVKWMQGAEDLTPEDDMPVGRNVLELTDVKDSANYTCVAMSSLGVIEAVAQITVKSLPKAPGTPMVTENTATSITITWDSGNPDPVSYYVIEYKSKSQDGPYQIKEDITTTRYSIGGLSPNSEYEIWVSAVNSIGQGPPSESVVTRTGEQAPASAPRNVQARMLSATTMIVQWEEPVEPNGLIRGYRVYYTMEPEHPVGNWQKHNVDDSLLTTVGSLLEDETYTVRVLAFTSVGDGPLSDPIQVKTQQGVPGQPMNLRAEARSETSITLSWSPPRQESIIKYELLFREGDHGREVGRTFDPTTSYVVEDLKPNTEYAFRLAARSPQGLGAFTPVVRQRTLQSKPSAPPQDVKCVSVRSTAILVSWRPPPPETHNGALVGYSVRYRPLGSEDPEPKEVNGIPPTTTQILLEALEKWTQYRITTVAHTEVGPGPESSPVVVRTDEDVPSAPPRKVEAEALNATAIRVLWRSPAPGRQHGQIRGYQVHYVRMEGAEARGPPRIKDVMLADAQWETDDTAEYEMVITNLQPETAYSITVAAYTMKGDGARSKPKVVVTKGAVLGRPTLSVQQTPEGSLLARWEPPAGTAEDQVLGYRLQFGREDSTPLATLEFPPSEDRYTASGVHKGATYVFRLAARSRGGLGEEAAEVLSIPEDTPRGHPQILEAAGNASAGTVLLRWLPPVPAERNGAIVKYTVAVREAGALGPARETELPAAAEPGAENALTLQGLKPDTAYDLQVRAHTRRGPGPFSPPVRYRTFLRDQVSPKNFKVKMIMKTSVLLSWEFPDNYNSPTPYKIQYNGLTLDVDGRTTKKLITHLKPHTFYNFVLTNRGSSLGGLQQTVTAWTAFNLLNGKPSVAPKPDADGFIMVYLPDGQSPVPVQSYFIVMVPLRKSRGGQFLTPLGSPEDMDLEELIQDISRLQRRSLRHSRQLEVPRPYIAARFSVLPPTFHPGDQKQYGGFDNRGLEPGHRYVLFVLAVLQKSEPTFAASPFSDPFQLDNPDPQPIVDGEEGLIWVIGPVLAVVFIICIVIAILLYKNKPDSKRKDSEPRTKCLLNNADLAPHHPKDPVEMRRINFQTPDSGLRSPLREPGFHFESMLSHPPIPIADMAEHTERLKANDSLKLSQEYESIDPGQQFTWEHSNLEVNKPKNRYANVIAYDHSRVILQPIEGIMGSDYINANYVDGYRRQNAYIATQGPLPETFGDFWRMVWEQRSATIVMMTRLEEKSRIKCDQYWPNRGTETYGFIQVTLLDTIELATFCVRTFSLHKNGSSEKREVRQFQFTAWPDHGVPEYPTPFLAFLRRVKTCNPPDAGPIVVHCSAGVGRTGCFIVIDAMLERIKPEKTVDVYGHVTLMRSQRNYMVQTEDQYSFIHEALLEAVGCGNTEVPARSLYAYIQKLAQVEPGEHVTGMELEFKRLANSKAHTSRFISANLPCNKFKNRLVNIMPYESTRVCLQPIRGVEGSDYINASFIDGYRQQKAYIATQGPLAETTEDFWRMLWENNSTIVVMLTKLREMGREKCHQYWPAERSARYQYFVVDPMAEYNMPQYILREFKVTDARDGQSRTVRQFQFTDWPEQGVPKSGEGFIDFIGQVHKTKEQFGQDGPISVHCSAGVGRTGVFITLSIVLERMRYEGVVDIFQTVKMLRTQRPAMVQTEDEYQFCYQAALEYLGSFDHYAT

SEQ ID NO: 30 - DNA, 6500 bp, Homo sapiens
attccatcccatcaccccatgatccttccccattgtcccatgaacagcccctgcaggaccctcccctgctccatgtgaccctccctctgcctcctccatgaaggtctcctggatttccccactcgcctctcacagccctccattgtctctgcagacgttgccccatctgacgctcggctcgaggcctctctgtgagggaccggggggccatccccctccagggcggagatcggaggtcgctgccaagcatggcgcccacctggggccctggcatggtgtctgtggttggtcccatgggcctccttgtggtcctgctcgttggaggctgtgcagcagaagagccccccaggtttatcaaagaacccaaggaccagatcggcgtgtcggggggtgtggcctctttcgtgtgtcaggccacgggtgaccccaagccacgagtgacctggaacaagaagggcaagaaggtcaactctcagcgctttgagacgattgagtttgatgagagtgcaggggcagtgctgaggatccagccgctgaggacaccgcgggatgaaaacgtgtacgagtgtgtggcccagaactcggttggggagatcacagtccatgccaagcttactgtcctccgagaggaccagctgccctctggcttccccaacatcgacatgggcccacagttgaaggtggtggagcggacacggacagccaccatgctctgtgcagccagcggcaaccctgaccctgagatcacctggttcaaggacttcctgcctgtggatcctagtgccagcaatggacgcatcaaacagctgcgatcagaaacctttgaaagcactccgattcgaggagccctgcagattgaaagcagtgaggaaaccgaccagggcaaatatgagtgtgtggccaccaacagcgccggcgtgcgctactcctcacctgccaacctctacgtgcgagagcttcgagaagtccgccgcgtggccccgcgcttctccatcctgcccatgagccacgagatcatgccagggggcaacgtgaacatcacctgcgtggccgtgggctcgcccatgccatacgtgaagtggatgcagggggccgaggacctgacccccgaggatgacatgcccgtgggtcggaacgtgctggaactcacagatgtcaaggactcggccaactacacctgcgtggccatgtccagcctgggcgtcattgaggcggttgctcagatcacggtgaaatctctccccaaagctcccgggactcccatggtgactgagaacacagccaccagcatcaccatcacgtgggactcgggcaacccagatcctgtgtcctattacgtcatcgaatataaatccaagagccaagacgggccgtatcagattaaagaggacatcaccaccacacgttacagcatcggcggcctgagccccaactcggagtacgagatctgggtgtcggccgtcaactccatcggccaggggccccccagcgagtccgtggtcacccgcacaggcgagcaggccccggccagcgcgccgcggaacgtgcaagcccggatgctcagcgcgaccaccatgattgtgcagtgggaggagccggtggagcccaacggcctgatccgcggctaccgcgtctactacaccatggaaccggagcaccccgtgggcaactggcagaagcacaacgtggacgacagcctgctgaccaccgtgggcagcctgctggaggacgagacctacaccgtgcgggtgctcgccttcacctccgtcggcgacgggcccctctcggaccccatccaggtcaagacgcagcagggagtgccgggccagcccatgaacctgcgggccgaggccaggtcggagaccagcatcacgctgtcctggagccccccgcggcaggagagtatcatcaagtacgagctcctcttccgggaaggcgaccatggccgggaggtgggaaggaccttcgacccgacgacttcctacgtggtggaggacctgaagcccaacacggagtacgccttccgcctggcggcccgctcgccgcagggcctgggcgccttcacccccgtggtgcggcagcgcacgctgcagtccaaaccgtcagccccccctcaagacgttaaatgtgtcagcgtgcgctccacggccattttggtaagttggcgcccgccgccgccggaaacgcacaacggggccctggtgggctacagcgtccgctaccgaccgctgggctcagaggacccggaacccaaggaggtgaacggcatccccccgaccaccactcagatcctgctggaggccttggagaagtggacccagtaccgcatcacgactgtcgctcacacagaggtgggaccagggcccgagagctcgcccgtggtcgtccgcaccgacgaggatgtgcccagcgcgccgccgcggaaggtggaggcggaggcgctcaacgccacggccatccgcgtgctgtggcgctcgcccgcgcccggccggcagcacggccagatccgcggctaccaggtccactacgtgcgcatggagggcgccgaggcccgcgggccgccgcgcatcaaggacgtcatgctggccgatgcccagtgggagacggatgacacggccgaatatgagatggtcatcacaaacttgcagcctgagaccgcgtactccatcacggtagccgcctacaccatgaagggcgatggcgctcgcagcaaacccaaggtggttgtgaccaagggagcagtgctgggccgcccaaccctgtcggtgcagcagacccccgagggcagcctgctggcacgctgggagcccccggctggcaccgcggaggaccaggtgctgggctaccgcctgcagtttggccgtgaggactcgacgcccctggccaccctggagttcccgccctccgaggaccgctacacggcatcaggcgtgcacaagggggccacgtatgtgttccggcttgcggcccggagccgcggcggcctgggcgaggaggcagccgaggtcctgagcatcccggaggacacgccccgtggccacccgcagattctggaggcggccggcaacgcctcggccgggaccgtccttctccgctggctgccacccgtgcccgccgagcgcaacggggccatcgtcaaatacacggtggccgtgcgggaggccggtgccctgggccctgcccgagagactgagctgccggcagcggctgagccgggcgcggagaacgcgctcacgctgcagggcctgaagcccgacacggcctatgacctccaagtgcgagcccacacgcgccggggccctggccccttcagcccccccgtccgctaccggacgttcctgcgggaccaagtctcgcccaagaacttcaaggtgaaaatgatcatgaagacatcagttctgctcagctgggagttccctgacaactacaactcacccacaccctacaagatccagtacaatgggctcacactggatgtggatggccgtaccaccaagaagctcatcacgcacctcaagccccacaccttctacaactttgtgctgaccaatcgcggcagcagcctgggcggcctccagcagacggtcaccgcctggactgccttcaacctgctcaacggcaagcccagcgtcgcccccaagcctgatgctgacggcttcatcatggtgtatcttcctgacggccagagccccgtgcctgtccagagctatttcattgtgatggtgccactgcgcaagtctcgtggaggccaattcctgaccccgctgggtagcccagaggacatggatctggaagagctcatccaggacatctcacggctacagaggcgcagcctgcggcactcgcgtcagctggaggtgccccggccctatattgcagctcgcttctctgtgctgccacccacgttccatcccggcgaccagaagcagtatggcggcttcgataaccggggcctggagcccggccaccgctatgtcctcttcgtgcttgccgtgcttcagaagagcgagcctacctttgcagccagtcccttctcagaccccttccagctggataacccggacccccagcccatcgtggatggcgaggaggggcttatctgggtgatcgggcctgtgctggccgtggtcttcataatctgcattgtcattgctatcctgctctacaagaacaaacccgacagtaaacgcaaggactcagaaccccgcaccaaatgcctcctgaacaatgccgacctcgcccctcaccaccccaaggaccctgtggaaatgagacgcattaacttccagactccagattcaggcctcaggagccccctcagggagccggggtttcactttgaaagcatgcttagccacccgccaattcccatcgcagacatggcggagcacacggagcggctcaaggccaacgacagcctcaagctctcccaggagtatgagtccatcgaccctggacagcagttcacatgggaacattccaacctggaagtgaacaagccgaagaaccgctatgccaacgtcatcgcctatgaccactcccgtgtcatcctccagcccattgaaggcatcatgggcagtgattacatcaatgccaactacgtggacggctaccggcgtcagaacgcgtacattgccacgcaggggccgctgcctgagacctttggggacttctggcgtatggtgtgggagcagcggtcggcgaccatcgtcatgatgacgcggctggaggagaagtcacggatcaagtgtgatcagtattggcccaacagaggcacggagacctacggcttcatccaggtcacgttgctagataccatcgagctggccacattctgcgtcaggacattctctctgcacaagaatggctccagtgagaaacgcgaggtccgccagttccagtttacggcgtggccggaccatggcgtgcccgaatacccaacgcccttcctggctttcctgcggagagtcaagacctgcaacccgccagatgccggccccatcgtggttcactgcagtgccggtgtgggccgcacaggctgctttatcgtcatcgacgccatgcttgagcggatcaagccagagaagacagtcgatgtctatggccacgtgacgctcatgaggtcccagcgcaactacatggtgcagacggaggaccagtacagcttcatccacgaggccctgctggaggccgtgggctgtggcaacacagaagtgcccgcacgcagcctctatgcctacatccagaagctggcccaggtggagcctggcgaacacgtcactggcatggaactcgagttcaagcggctggctaactccaaggcccacacgtcacgcttcatcagtgccaatctgccttgtaacaagttcaagaaccgcctggtgaacatcatgccctatgagagcacacgggtctgtctgcaacccatccggggtgtggagggctctgactacatcaacgccagcttcattgatggctacaggcagcagaaggcctacatcgcgacacaggggccgctggcggagaccacggaagacttctggcgcatgctgtgggagaacaattcgacgatcgtggtgatgctgaccaagctgcgggagatgggccgggagaagtgtcaccagtactggccggccgagcgctctgcccgctaccagtactttgtggtagatccgatggcagaatacaacatgcctcagtatatcctgcgagagttcaaggtcacagatgcccgggatggccagtcccggactgtccggcagttccagttcacagactggccggaacagggtgtgccaaagtcgggggagggcttcatcgacttcattggccaagtgcataagactaaggagcagtttggccaggacggccccatctctgtccactgcagtgccggcgtgggcaggacgggcgtcttcatcacgcttagcatcgtgctggagcggatgcggtatgaaggcgtggtggacatctttcagacggtgaagatgctacgaacccagcggccggccatggtgcagacagaggatgagtaccagttctgttaccaggcggcactggagtacctcggaagctttgaccactatgcaacctaaagccatggtcccccccaggcccgacaccactggccccggatgcctctgcccctcccgggcggacctcctgaggcctggacccccagtgggcagggcaggaggtggcagcggcagcagctgtgtttctgcaccatttccgaggacgacgcagcccctcgagcccccccaccggccccggccgccccagcgacctccctggcacggccgccgccttcaaatacttggcacattcctcctttccttccaattccaaaaccagattccggggtggggggtggggggatggtgagcaaataggagtgctccccagaaccagaggagggtggggcacagaccatagacggacccctcgtcctcccccagcggtggtagggggacccggggggctcctccccgctctgcacc

SEQ ID NO: 31 - protein, 1910 aa, Homo sapiens
MAPTWGPGMVSVVGPMGLLVVLLVGGCAAEEPPRFIKEPKDQIGVSGGVASFVCQATGDPKPRVTWNKKGKKVNSQRFETIEFDESAGAVLRIQPLRTPRDENVYECVAQNSVGEITVHAKLTVLREDQLPSGFPNIDMGPQLKVVERTRTATMLCAASGNPDPEITWFKDFLPVDPSASNGRIKQLRSGALQIESSEETDQGKYECVATNSAGVRYSSPANLYVRVRRVAPRFSILPMSHEIMPGGNVNITCVAVGSPMPYVKWMQGAEDLTPEDDMPVGRNVLELTDVKDSANYTCVAMSSLGVIEAVAQITVKSLPKAPGTPMVTENTATSITITWDSGNPDPVSYYVIEYKSKSQDGPYQIKEDITTTRYSIGGLSPNSEYEIWVSAVNSIGQGPPSESVVTRTGEQAPASAPRNVQARMLSATTMIVQWEEPVEPNGLIRGYRVYYTMEPEHPVGNWQKHNVDDSLLTTVGSLLEDETYTVRVLAFTSVGDGPLSDPIQVKTQQGVPGQPMNLRAEARSETSITLSWSPPRQESIIKYELLFREGDHGREVGRTFDPTTSYVVEDLKPNTEYAFRLAARSPQGLGAFTPVVRQRTLQSKPSAPPQDVKCVSVRSTAILVSWRPPPPETHNGALVGYSVRYRPLGSEDPEPKEVNGIPPTTTQILLEALEKWTQYRITTVAHTEVGPGPESSPVVVRTDEDVPSAPPRKVEAEALNATAIRVLWRSPAPGRQHGQIRGYQVHYVRMEGAEARGPPRIKDVMLADAQEMVITNLQPETAYSITVAAYTMKGDGARSKPKVVVTKGAVLGRPTLSVQQTPEGSLLARWEPPAGTAEDQVLGYRLQFGREDSTPLATLEFPPSEDRYTASGVHKGATYVFRLAARSRGGLGEEAAEVLSIPEDTPRGHPQILEAAGNASAGTVLLRWLPPVPAERNGAIVKYTVAVREAGALGPARETELPAAAEPGAENALTLQGLKPDTAYDLQVRAHTRRGPGPFSPPVRYRTFLRDQVSPKNFKVKMIMKTSVLLSWEFPDNYNSPTPYKIQYNGLTLDVDGRTTKKLITHLKPHTFYNFVLTNRGSSLGGLQQTVTAWTAFNLLNGKPSVAPKPDADGFIMVYLPDGQSPVPVQSYFIVMVPLRKSRGGQFLTPLGSPEDMDLEELIQDISRLQRRSLRHSRQLEVPRPYIAARFSVLPPTFHPGDQKQYGGFDNRGLEPGHRYVLFVLAVLQKSEPTFAASPFSDPFQLDNPDPQPIVDGEEGLIWVIGPVLAVVFIICIVIAILLYKNKPDSKRKDSEPRTKCLLNNADLAPHHPKDPVEMRRINFQTPGMLSHPPIPIADMAEHTERLKANDSLKLSQEYESIDPGQQFTWEHSNLEVNKPKNRYANVIAYDHSRVILQPIEGIMGSDYINANYVDGYRRQNAYIATQGPLPETFGDFWRMVWEQRSATIVMMTRLEEKSRIKCDQYWPNRGTETYGFIQVTLLDTIELATFCVRTFSLHKNGSSEKREVRQFQFTAWPDHGVPEYPTPFLAFLRRVKTCNPPDAGPIVVHCSAGVGRTGCFIVIDAMLERIKPEKTVDVYGHVTLMRSQRNYMVQTEDQYSFIHEALLEAVGCGNTEVPARSLYAYIQKLAQVEPGEHVTGMELEFKRLANSKAHTSRFISANLPCNKFKNRLVNIMPYESTRVCLQPIRGVEGSDYINASFIDGYRQQKAYIATQGPLAETTEDFWRMLWENNSTIVVMLTKLREMGREKCHQYWPAERSARYQYFVVDPMAEYNMPQYILREFKVTDARDGQSRTVRQFQFTDWPEQGVPKSGEGFIDFIGQVHKTKEQFGQDGPISVHCSAGVGRTGVFITLSIVLERMRYEGVVDIFQTVKMLRTQRPAMVQTEDEYQFCYQAALEYLGSFDHYAT

SEQ ID NO: 32 - DNA, 6386 bp, Homo sapiens
attccatcccatcaccccatgatccttccccattgtcccatgaacagcccctgcaggaccctcccctgctccatgtgaccctccctctgcctcctccatgaaggtctcctggatttccccactcgcctctcacagccctccattgtctctgcagacgttgccccatctgacgctcggctcgaggcctctctgtgagggaccggggggccatccccctccagggcggagatcggaggtcgctgccaagcatggcgcccacctggggccctggcatggtgtctgtggttggtcccatgggcctccttgtggtcctgctcgttggaggctgtgcagcagaagagccccccaggtttatcaaagaacccaaggaccagatcggcgtgtcggggggtgtggcctctttcgtgtgtcaggccacgggtgaccccaagccacgagtgacctggaacaagaagggcaagaaggtcaactctcagcgctttgagacgattgagtttgatgagagtgcaggggcagtgctgaggatccagccgctgaggacaccgcgggatgaaaacgtgtacgagtgtgtggcccagaactcggttggggagatcacagtccatgccaagcttactgtcctccgagaggaccagctgccctctggcttccccaacatcgacatgggcccacagttgaaggtggtggagcggacacggacagccaccatgctctgtgcagccagcggcaaccctgaccctgagatcacctggttcaaggacttcctgcctgtggatcctagtgccagcaatggacgcatcaaacagctgcgatcaggagccctgcagattgaaagcagtgaggaaaccgaccagggcaaatatgagtgtgtggccaccaacagcgccggcgtgcgctactcctcacctgccaacctctacgtgcgagtccgccgcgtggccccgcgcttctccatcctgcccatgagccacgagatcatgccagggggcaacgtgaacatcacctgcgtggccgtgggctcgcccatgccatacgtgaagtggatgcagggggccgaggacctgacccccgaggatgacatgcccgtgggtcggaacgtgctggaactcacagatgtcaaggactcggccaactacacctgcgtggccatgtccagcctgggcgtcattgaggcggttgctcagatcacggtgaaatctctccccaaagctcccgggactcccatggtgactgagaacacagccaccagcatcaccatcacgtgggactcgggcaacccagatcctgtgtcctattacgtcatcgaatataaatccaagagccaagacgggccgtatcagattaaagaggacatcaccaccacacgttacagcatcggcggcctgagccccaactcggagtacgagatctgggtgtcggccgtcaactccatcggccaggggccccccagcgagtccgtggtcacccgcacaggcgagcaggccccggccagcgcgccgcggaacgtgcaagcccggatgctcagcgcgaccaccatgattgtgcagtgggaggagccggtggagcccaacggcctgatccgcggctaccgcgtctactacaccatggaaccggagcaccccgtgggcaactggcagaagcacaacgtggacgacagcctgctgaccaccgtgggcagcctgctggaggacgagacctacaccgtgcgggtgctcgccttcacctccgtcggcgacgggcccctctcggaccccatccaggtcaagacgcagcagggagtgccgggccagcccatgaacctgcgggccgaggccaggtcggagaccagcatcacgctgtcctggagccccccgcggcaggagagtatcatcaagtacgagctcctcttccgggaaggcgaccatggccgggaggtgggaaggaccttcgacccgacgacttcctacgtggtggaggacctgaagcccaacacggagtacgccttccgcctggcggcccgctcgccgcagggcctgggcgccttcacccccgtggtgcggcagcgcacgctgcagtccaaaccgtcagccccccctcaagacgttaaatgtgtcagcgtgcgctccacggccattttggtaagttggcgcccgccgccgccggaaacgcacaacggggccctggtgggctacagcgtccgctaccgaccgctgggctcagaggacccggaacccaaggaggtgaacggcatccccccgaccaccactcagatcctgctggaggccttggagaagtggacccagtaccgcatcacgactgtcgctcacacagaggtgggaccagggcccgagagctcgcccgtggtcgtccgcaccgacgaggatgtgcccagcgcgccgccgcggaaggtggaggcggaggcgctcaacgccacggccatccgcgtgctgtggcgctcgcccgcgcccggccggcagcacggccagatccgcggctaccaggtccactacgtgcgcatggagggcgccgaggcccgcgggccgccgcgcatcaaggacgtcatgctggccgatgcccaggagatggtcatcacaaacttgcagcctgagaccgcgtactccatcacggtagccgcctacaccatgaagggcgatggcgctcgcagcaaacccaaggtggttgtgaccaagggagcagtgctgggccgcccaaccctgtcggtgcagcagacccccgagggcagcctgctggcacgctgggagcccccggctggcaccgcggaggaccaggtgctgggctaccgcctgcagtttggccgtgaggactcgacgcccctggccaccctggagttcccgccctccgaggaccgctacacggcatcaggcgtgcacaagggggccacgtatgtgttccggcttgcggcccggagccgcggcggcctgggcgaggaggcagccgaggtcctgagcatcccggaggacacgccccgtggccacccgcagattctggaggcggccggcaacgcctcggccgggaccgtccttctccgctggctgccacccgtgcccgccgagcgcaacggggccatcgtcaaatacacggtggccgtgcgggaggccggtgccctgggccctgcccgagagactgagctgccggcagcggctgagccgggcgcggagaacgcgctcacgctgcagggcctgaagcccgacacggcctatgacctccaagtgcgagcccacacgcgccggggccctggccccttcagcccccccgtccgctaccggacgttcctgcgggaccaagtctcgcccaagaacttcaaggtgaaaatgatcatgaagacatcagttctgctcagctgggagttccctgacaactacaactcacccacaccctacaagatccagtacaatgggctcacactggatgtggatggccgtaccaccaagaagctcatcacgcacctcaagccccacaccttctacaactttgtgctgaccaatcgcggcagcagcctgggcggcctccagcagacggtcaccgcctggactgccttcaacctgctcaacggcaagcccagcgtcgcccccaagcctgatgctgacggcttcatcatggtgtatcttcctgacggccagagccccgtgcctgtccagagctatttcattgtgatggtgccactgcgcaagtctcgtggaggccaattcctgaccccgctgggtagcccagaggacatggatctggaagagctcatccaggacatctcacggctacagaggcgcagcctgcggcactcgcgtcagctggaggtgccccggccctatattgcagctcgcttctctgtgctgccacccacgttccatcccggcgaccagaagcagtatggcggcttcgataaccggggcctggagcccggccaccgctatgtcctcttcgtgcttgccgtgcttcagaagagcgagcctacctttgcagccagtcccttctcagaccccttccagctggataacccggacccccagcccatcgtggatggcgaggaggggcttatctgggtgatcgggcctgtgctggccgtggtcttcataatctgcattgtcattgctatcctgctctacaagaacaaacccgacagtaaacgcaaggactcagaaccccgcaccaaatgcctcctgaacaatgccgacctcgcccctcaccaccccaaggaccctgtggaaatgagacgcattaacttccagactccaggcatgcttagccacccgccaattcccatcgcagacatggcggagcacacggagcggctcaaggccaacgacagcctcaagctctcccaggagtatgagtccatcgaccctggacagcagttcacatgggaacattccaacctggaagtgaacaagccgaagaaccgctatgccaacgtcatcgcctatgaccactcccgtgtcatcctccagcccattgaaggcatcatgggcagtgattacatcaatgccaactacgtggacggctaccggcgtcagaacgcgtacattgccacgcaggggccgctgcctgagacctttggggacttctggcgtatggtgtgggagcagcggtcggcgaccatcgtcatgatgacgcggctggaggagaagtcacggatcaagtgtgatcagtattggcccaacagaggcacggagacctacggcttcatccaggtcacgttgctagataccatcgagctggccacattctgcgtcaggacattctctctgcacaagaatggctccagtgagaaacgcgaggtccgccagttccagtttacggcgtggccggaccatggcgtgcccgaatacccaacgcccttcctggctttcctgcggagagtcaagacctgcaacccaccagatgccggccccatcgtggttcactgcagtgccggtgtgggccgcacaggctgctttatcgtcatcgacgccatgcttgagcggatcaagccagagaagacagtcgatgtctatggccacgtgacgctcatgaggtcccagcgcaactacatggtgcagacggaggaccagtacagcttcatccacgaggccctgctggaggccgtgggctgtggcaacacagaagtgcccgcacgcagcctctatgcctacatccagaagctggcccaggtggagcctggcgaacacgtcactggcatggaactcgagttcaagcggctggctaactccaaggcccacacgtcacgcttcatcagtgccaatctgccttgtaacaagttcaagaaccgcctggtgaacatcatgccctatgagagcacacgggtctgtctgcaacccatccggggtgtggagggctctgactacatcaacgccagcttcattgatggctacaggcagcagaaggcctacatcgcgacacaggggccgctggcggagaccacggaagacttctggcgcatgctgtgggagaacaattcgacgatcgtggtgatgctgaccaagctgcgggagatgggccgggagaagtgtcaccagtactggccggccgagcgctctgcccgctaccagtactttgtggtagatccgatggcagaatacaacatgcctcagtatatcctgcgagagttcaaggtcacagatgcccgggatggccagtcccggactgtccggcagttccagttcacagactggccggaacagggtgtgccaaagtcgggggagggcttcatcgacttcattggccaagtgcataagactaaggagcagtttggccaggacggccccatctctgtccactgcagtgccggcgtgggcaggacgggcgtcttcatcacgcttagcatcgtgctggagcggatgcggtatgaaggcgtggtggacatctttcagacggtgaagatgctacgaacccagcggccggccatggtgcagacagaggatgagtaccagttctgttaccaggcggcactggagtacctcggaagctttgaccactatgcaacctaaagccatggtcccccccaggcccgacaccactggccccggatgcctctgcccctcccgggcggacctcctgaggcctggacccccagtgggcagggcaggaggtggcagcggcagcagctgtgtttctgcaccatttccgaggacgacgcagcccctcgagcccccccaccggccccggccgccccagcgacctccctggcacggccgccgccttcaaatacttggcacattcctcctttccttccaattccaaaaccagattccggggtggggggtggggggatggtgagcaaataggagtgctccccagaaccagaggagggtggggcacagaccatagacggacccctcgtcctcccccagcggtggtagggggacccggggggctcctccccgctctgcacc

SEQ ID NO: 33 - protein, 1501 aa, Homo sapiens
MAPTWGPGMVSVVGPMGLLVVLLVGGCAAEEPPRFIKEPKDQIGVSGGVASFVCQATGDPKPRVTWNKKGKKVNSQRFETIEFDESAGAVLRIQPLRTPRDENVYECVAQNSVGEITVHAKLTVLREDQLPSGFPNIDMGPQLKVVERTRTATMLCAASGNPDPEITWFKDFLPVDPSASNGRIKQLRSGALQIESSEETDQGKYECVATNSAGVRYSSPANLYVRVRRVAPRFSILPMSHEIMPGGNVNITCVAVGSPMPYVKWMQGAEDLTPEDDMPVGRNVLELTDVKDSANYTCVAMSSLGVIEAVAQITVKSLPKAPGTPMVTENTATSITITWDSGNPDPVSYYVIEYKSKSQDGPYQIKEDITTTRYSIGGLSPNSEYEIWVSAVNSIGQGPPSESVVTRTGEQAPASAPRNVQARMLSATTMIVQWEEPVEPNGLIRGYRVYYTMEPEHPVGNWQKHNVDDSLLTTVGSLLEDETYTVRVLAFTSVGDGPLSDPIQVKTQQGVPGQPMNLRAEARSETSITLSWSPPRQESIIKYELLFREGDHGREVGRTFDPTTSYVVEDLKPNTEYAFRLAARSPQGLGAFTPVVRQRTLQSISPKNFKVKMIMKTSVLLSWEFPDNYNSPTPYKIQYNGLTLDVDGRTTKKLITHLKPHTFYNFVLTNRGSSLGGLQQTVTAWTAFNLLNGKPSVAPKPDADGFIMVYLPDGQSPVPVQSYFIVMVPLRKSRGGQFLTPLGSPEDMDLEELIQDISRLQRRSLRHSRQLEVPRPYIAARFSVLPPTFHPGDQKQYGGFDNRGLEPGHRYVLFVLAVLQKSEPTFAASPFSDPFQLDNPDPQPIVDGEEGLIWVIGPVLAVVFIICIVIAILLYKNKPDSKRKDSEPRTKCLLNNADLAPHHPKDPVEMRRINFQTPGMLSHPPIPIADMAEHTERLKANDSLKLSQEYESIDPGQQFTWEHSNLEVNKPKNRYANVIAYDHSRVILQPIEGIMGSDYINANYVDGYRRQNAYIATQGPLPETFGDFWRMVWEQRSATIVMMTRLEEKSRIKCDQYWPNRGTETYGFIQVTLLDTIELATFCVRTFSLHKNGSSEKREVRQFQFTAWPDHGVPEYPTPFLAFLRRVKTCNPPDAGPIVVHCSAGVGRTGCFIVIDAMLERIKPEKTVDVYGHVTLMRSQRNYMVQTEDQYSFIHEALLEAVGCGNTEVPARSLYAYIQKLAQVEPGEHVTGMELEFKRLANSKAHTSRFISANLPCNKFKNRLVNIMPYESTRVCLQPIRGVEGSDYINASFIDGYRQQKAYIATQGPLAETTEDFWRMLWENNSTIVVMLTKLREMGREKCHQYWPAERSARYQYFVVDPMAEYNMPQYILREFKVTDARDGQSRTVRQFQFTDWPEQGVPKSGEGFIDFIGQVHKTKEQFGQDGPISVHCSAGVGRTGVFITLSIVLERMRYEGVVDIFQTVKMLRTQRPAMVQTEDEYQFCYQAALEYLGSFDHYAT

SEQ ID NO: 34 - DNA, 5159 bp, Homo sapiens
attccatcccatcaccccatgatccttccccattgtcccatgaacagcccctgcaggaccctcccctgctccatgtgaccctccctctgcctcctccatgaaggtctcctggatttccccactcgcctctcacagccctccattgtctctgcagacgttgccccatctgacgctcggctcgaggcctctctgtgagggaccggggggccatccccctccagggcggagatcggaggtcgctgccaagcatggcgcccacctggggccctggcatggtgtctgtggttggtcccatgggcctccttgtggtcctgctcgttggaggctgtgcagcagaagagccccccaggtttatcaaagaacccaaggaccagatcggcgtgtcggggggtgtggcctctttcgtgtgtcaggccacgggtgaccccaagccacgagtgacctggaacaagaagggcaagaaggtcaactctcagcgctttgagacgattgagtttgatgagagtgcaggggcagtgctgaggatccagccgctgaggacaccgcgggatgaaaacgtgtacgagtgtgtggcccagaactcggttggggagatcacagtccatgccaagcttactgtcctccgagaggaccagctgccctctggcttccccaacatcgacatgggcccacagttgaaggtggtggagcggacacggacagccaccatgctctgtgcagccagcggcaaccctgaccctgagatcacctggttcaaggacttcctgcctgtggatcctagtgccagcaatggacgcatcaaacagctgcgatcaggagccctgcagattgaaagcagtgaggaaaccgaccagggcaaatatgagtgtgtggccaccaacagcgccggcgtgcgctactcctcacctgccaacctctacgtgcgagtccgccgcgtggccccgcgcttctccatcctgcccatgagccacgagatcatgccagggggcaacgtgaacatcacctgcgtggccgtgggctcgcccatgccatacgtgaagtggatgcagggggccgaggacctgacccccgaggatgacatgcccgtgggtcggaacgtgctggaactcacagatgtcaaggactcggccaactacacctgcgtggccatgtccagcctgggcgtcattgaggcggttgctcagatcacggtgaaatctctccccaaagctcccgggactcccatggtgactgagaacacagccaccagcatcaccatcacgtgggactcgggcaacccagatcctgtgtcctattacgtcatcgaatataaatccaagagccaagacgggccgtatcagattaaagaggacatcaccaccacacgttacagcatcggcggcctgagccccaactcggagtacgagatctgggtgtcggccgtcaactccatcggccaggggccccccagcgagtccgtggtcacccgcacaggcgagcaggccccggccagcgcgccgcggaacgtgcaagcccggatgctcagcgcgaccaccatgattgtgcagtgggaggagccggtggagcccaacggcctgatccgcggctaccgcgtctactacaccatggaaccggagcaccccgtgggcaactggcagaagcacaacgtggacgacagcctgctgaccaccgtgggcagcctgctggaggacgagacctacaccgtgcgggtgctcgccttcacctccgtcggcgacgggcccctctcggaccccatccaggtcaagacgcagcagggagtgccgggccagcccatgaacctgcgggccgaggccaggtcggagaccagcatcacgctgtcctggagccccccgcggcaggagagtatcatcaagtacgagctcctcttccgggaaggcgaccatggccgggaggtgggaaggaccttcgacccgacgacttcctacgtggtggaggacctgaagcccaacacggagtacgccttccgcctggcggcccgctcgccgcagggcctgggcgccttcacccccgtggtgcggcagcgcacgctgcagtccatctcgcccaagaacttcaaggtgaaaatgatcatgaagacatcagttctgctcagctgggagttccctgacaactacaactcacccacaccctacaagatccagtacaatgggctcacactggatgtggatggccgtaccaccaagaagctcatcacgcacctcaagccccacaccttctacaactttgtgctgaccaatcgcggcagcagcctgggcggcctccagcagacggtcaccgcctggactgccttcaacctgctcaacggcaagcccagcgtcgcccccaagcctgatgctgacggcttcatcatggtgtatcttcctgacggccagagccccgtgcctgtccagagctatttcattgtgatggtgccactgcgcaagtctcgtggaggccaattcctgaccccgctgggtagcccagaggacatggatctggaagagctcatccaggacatctcacggctacagaggcgcagcctgcggcactcgcgtcagctggaggtgccccggccctatattgcagctcgcttctctgtgctgccacccacgttccatcccggcgaccagaagcagtatggcggcttcgataaccggggcctggagcccggccaccgctatgtcctcttcgtgcttgccgtgcttcagaagagcgagcctacctttgcagccagtcccttctcagaccccttccagctggataacccggacccccagcccatcgtggatggcgaggaggggcttatctgggtgatcgggcctgtgctggccgtggtcttcataatctgcattgtcattgctatcctgctctacaagaacaaacccgacagtaaacgcaaggactcagaaccccgcaccaaatgcctcctgaacaatgccgacctcgcccctcaccaccccaaggaccctgtggaaatgagacgcattaacttccagactccaggcatgcttagccacccgccaattcccatcgcagacatggcggagcacacggagcggctcaaggccaacgacagcctcaagctctcccaggagtatgagtccatcgaccctggacagcagttcacatgggaacattccaacctggaagtgaacaagccgaagaaccgctatgccaacgtcatcgcctatgaccactcccgtgtcatcctccagcccattgaaggcatcatgggcagtgattacatcaatgccaactacgtggacggctaccggcgtcagaacgcgtacattgccacgcaggggccgctgcctgagacctttggggacttctggcgtatggtgtgggagcagcggtcggcgaccatcgtcatgatgacgcggctggaggagaagtcacggatcaagtgtgatcagtattggcccaacagaggcacggagacctacggcttcatccaggtcacgttgctagataccatcgagctggccacattctgcgtcaggacattctctctgcacaagaatggctccagtgagaaacgcgaggtccgccagttccagtttacggcgtggccggaccatggcgtgcccgaatacccaacgcccttcctggctttcctgcggagagtcaagacctgcaacccaccagatgccggccccatcgtggttcactgcagtgccggtgtgggccgcacaggctgctttatcgtcatcgacgccatgcttgagcggatcaagccagagaagacagtcgatgtctatggccacgtgacgctcatgaggtcccagcgcaactacatggtgcagacggaggaccagtacagcttcatccacgaggccctgctggaggccgtgggctgtggcaacacagaagtgcccgcacgcagcctctatgcctacatccagaagctggcccaggtggagcctggcgaacacgtcactggcatggaactcgagttcaagcggctggctaactccaaggcccacacgtcacgcttcatcagtgccaatctgccttgtaacaagttcaagaaccgcctggtgaacatcatgccctatgagagcacacgggtctgtctgcaacccatccggggtgtggagggctctgactacatcaacgccagcttcattgatggctacaggcagcagaaggcctacatcgcgacacaggggccgctggcggagaccacggaagacttctggcgcatgctgtgggagaacaattcgacgatcgtggtgatgctgaccaagctgcgggagatgggccgggagaagtgtcaccagtactggccggccgagcgctctgcccgctaccagtactttgtggtagatccgatggcagaatacaacatgcctcagtatatcctgcgagagttcaaggtcacagatgcccgggatggccagtcccggactgtccggcagttccagttcacagactggccggaacagggtgtgccaaagtcgggggagggcttcatcgacttcattggccaagtgcataagactaaggagcagtttggccaggacggccccatctctgtccactgcagtgccggcgtgggcaggacgggcgtcttcatcacgcttagcatcgtgctggagcggatgcggtatgaaggcgtggtggacatctttcagacggtgaagatgctacgaacccagcggccggccatggtgcagacagaggatgagtaccagttctgttaccaggcggcactggagtacctcggaagctttgaccactatgcaacctaaagccatggtcccccccaggcccgacaccactggccccggatgcctctgcccctcccgggcggacctcctgaggcctggacccccagtgggcagggcaggaggtggcagcggcagcagctgtgtttctgcaccatttccgaggacgacgcagcccctcgagcccccccaccggccccggccgccccagcgacctccctggcacggccgccgccttcaaatacttggcacattcctcctttccttccaattccaaaaccagattccggggtggggggtggggggatggtgagcaaataggagtgctccccagaaccagaggagggtggggcacagaccatagacggacccctcgtcctcccccagcggtggtagggggacccggggggctcctccccgctctgcacc

SEQ ID NO: 35 - protein, 1505 aa, Homo sapiens
MAPTWGPGMVSVVGPMGLLVVLLVGGCAAEEPPRFIKEPKDQIGVSGGVASFVCQATGDPKPRVTWNKKGKKVNSQRFETIEFDESAGAVLRIQPLRTPRDENVYECVAQNSVGEITVHAKLTVLREDQLPSGFPNIDMGPQLKVVERTRTATMLCAASGNPDPEITWFKDFLPVDPSASNGRIKQLRSGALQIESSEETDQGKYECVATNSAGVRYSSPANLYVRELREVRRVAPRFSILPMSHEIMPGGNVNITCVAVGSPMPYVKWMQGAEDLTPEDDMPVGRNVLELTDVKDSANYTCVAMSSLGVIEAVAQITVKSLPKAPGTPMVTENTATSITITWDSGNPDPVSYYVIEYKSKSQDGPYQIKEDITTTRYSIGGLSPNSEYEIWVSAVNSIGQGPPSESVVTRTGEQAPASAPRNVQARMLSATTMIVQWEEPVEPNGLIRGYRVYYTMEPEHPVGNWQKHNVDDSLLTTVGSLLEDETYTVRVLAFTSVGDGPLSDPIQVKTQQGVPGQPMNLRAEARSETSITLSWSPPRQESIIKYELLFREGDHGREVGRTFDPTTSYVVEDLKPNTEYAFRLAARSPQGLGAFTPVVRQRTLQSISPKNFKVKMIMKTSVLLSWEFPDNYNSPTPYKIQYNGLTLDVDGRTTKKLITHLKPHTFYNFVLTNRGSSLGGLQQTVTAWTAFNLLNGKPSVAPKPDADGFIMVYLPDGQSPVPVQSYFIVMVPLRKSRGGQFLTPLGSPEDMDLEELIQDISRLQRRSLRHSRQLEVPRPYIAARFSVLPPTFHPGDQKQYGGFDNRGLEPGHRYVLFVLAVLQKSEPTFAASPFSDPFQLDNPDPQPIVDGEEGLIWVIGPVLAVVFIICIVIAILLYKNKPDSKRKDSEPRTKCLLNNADLAPHHPKDPVEMRRINFQTPGMLSHPPIPIADMAEHTERLKANDSLKLSQEYESIDPGQQFTWEHSNLEVNKPKNRYANVIAYDHSRVILQPIEGIMGSDYINANYVDGYRRQNAYIATQGPLPETFGDFWRMVWEQRSATIVMMTRLEEKSRIKCDQYWPNRGTETYGFIQVTLLDTIELATFCVRTFSLHKNGSSEKREVRQFQFTAWPDHGVPEYPTPFLAFLRRVKTCNPPDAGPIVVHCSAGVGRTGCFIVIDAMLERIKPEKTVDVYGHVTLMRSQRNYMVQTEDQYSFIHEALLEAVGCGNTEVPARSLYAYIQKLAQVEPGEHVTGMELEFKRLANSKAHTSRFISANLPCNKFKNRLVNIMPYESTRVCLQPIRGVEGSDYINASFIDGYRQQKAYIATQGPLAETTEDFWRMLWENNSTIVVMLTKLREMGREKCHQYWPAERSARYQYFVVDPMAEYNMPQYILREFKVTDARDGQSRTVRQFQFTDWPEQGVPKSGEGFIDFIGQVHKTKEQFGQDGPISVHCSAGVGRTGVFITLSIVLERMRYEGVVDIFQTVKMLRTQRPAMVQTEDEYQFCYQAALEYLGSFDHYAT

SEQ ID NO: 36 - DNA, 5171 bp, Homo sapiens
attccatcccatcaccccatgatccttccccattgtcccatgaacagcccctgcaggaccctcccctgctccatgtgaccctccctctgcctcctccatgaaggtctcctggatttccccactcgcctctcacagccctccattgtctctgcagacgttgccccatctgacgctcggctcgaggcctctctgtgagggaccggggggccatccccctccagggcggagatcggaggtcgctgccaagcatggcgcccacctggggccctggcatggtgtctgtggttggtcccatgggcctccttgtggtcctgctcgttggaggctgtgcagcagaagagccccccaggtttatcaaagaacccaaggaccagatcggcgtgtcggggggtgtggcctctttcgtgtgtcaggccacgggtgaccccaagccacgagtgacctggaacaagaagggcaagaaggtcaactctcagcgctttgagacgattgagtttgatgagagtgcaggggcagtgctgaggatccagccgctgaggacaccgcgggatgaaaacgtgtacgagtgtgtggcccagaactcggttggggagatcacagtccatgccaagcttactgtcctccgagaggaccagctgccctctggcttccccaacatcgacatgggcccacagttgaaggtggtggagcggacacggacagccaccatgctctgtgcagccagcggcaaccctgaccctgagatcacctggttcaaggacttcctgcctgtggatcctagtgccagcaatggacgcatcaaacagctgcgatcaggagccctgcagattgaaagcagtgaggaaaccgaccagggcaaatatgagtgtgtggccaccaacagcgccggcgtgcgctactcctcacctgccaacctctacgtgcgagagcttcgagaagtccgccgcgtggccccgcgcttctccatcctgcccatgagccacgagatcatgccagggggcaacgtgaacatcacctgcgtggccgtgggctcgcccatgccatacgtgaagtggatgcagggggccgaggacctgacccccgaggatgacatgcccgtgggtcggaacgtgctggaactcacagatgtcaaggactcggccaactacacctgcgtggccatgtccagcctgggcgtcattgaggcggttgctcagatcacggtgaaatctctccccaaagctcccgggactcccatggtgactgagaacacagccaccagcatcaccatcacgtgggactcgggcaacccagatcctgtgtcctattacgtcatcgaatataaatccaagagccaagacgggccgtatcagattaaagaggacatcaccaccacacgttacagcatcggcggcctgagccccaactcggagtacgagatctgggtgtcggccgtcaactccatcggccaggggccccccagcgagtccgtggtcacccgcacaggcgagcaggccccggccagcgcgccgcggaacgtgcaagcccggatgctcagcgcgaccaccatgattgtgcagtgggaggagccggtggagcccaacggcctgatccgcggctaccgcgtctactacaccatggaaccggagcaccccgtgggcaactggcagaagcacaacgtggacgacagcctgctgaccaccgtgggcagcctgctggaggacgagacctacaccgtgcgggtgctcgccttcacctccgtcggcgacgggcccctctcggaccccatccaggtcaagacgcagcagggagtgccgggccagcccatgaacctgcgggccgaggccaggtcggagaccagcatcacgctgtcctggagccccccgcggcaggagagtatcatcaagtacgagctcctcttccgggaaggcgaccatggccgggaggtgggaaggaccttcgacccgacgacttcctacgtggtggaggacctgaagcccaacacggagtacgccttccgcctggcggcccgctcgccgcagggcctgggcgccttcacccccgtggtgcggcagcgcacgctgcagtccatctcgcccaagaacttcaaggtgaaaatgatcatgaagacatcagttctgctcagctgggagttccctgacaactacaactcacccacaccctacaagatccagtacaatgggctcacactggatgtggatggccgtaccaccaagaagctcatcacgcacctcaagccccacaccttctacaactttgtgctgaccaatcgcggcagcagcctgggcggcctccagcagacggtcaccgcctggactgccttcaacctgctcaacggcaagcccagcgtcgcccccaagcctgatgctgacggcttcatcatggtgtatcttcctgacggccagagccccgtgcctgtccagagctatttcattgtgatggtgccactgcgcaagtctcgtggaggccaattcctgaccccgctgggtagcccagaggacatggatctggaagagctcatccaggacatctcacggctacagaggcgcagcctgcggcactcgcgtcagctggaggtgccccggccctatattgcagctcgcttctctgtgctgccacccacgttccatcccggcgaccagaagcagtatggcggcttcgataaccggggcctggagcccggccaccgctatgtcctcttcgtgcttgccgtgcttcagaagagcgagcctacctttgcagccagtcccttctcagaccccttccagctggataacccggacccccagcccatcgtggatggcgaggaggggcttatctgggtgatcgggcctgtgctggccgtggtcttcataatctgcattgtcattgctatcctgctctacaagaacaaacccgacagtaaacgcaaggactcagaaccccgcaccaaatgcctcctgaacaatgccgacctcgcccctcaccaccccaaggaccctgtggaaatgagacgcattaacttccagactccaggcatgcttagccacccgccaattcccatcgcagacatggcggagcacacggagcggctcaaggccaacgacagcctcaagctctcccaggagtatgagtccatcgaccctggacagcagttcacatgggaacattccaacctggaagtgaacaagccgaagaaccgctatgccaacgtcatcgcctatgaccactcccgtgtcatcctccagcccattgaaggcatcatgggcagtgattacatcaatgccaactacgtggacggctaccggcgtcagaacgcgtacattgccacgcaggggccgctgcctgagacctttggggacttctggcgtatggtgtgggagcagcggtcggcgaccatcgtcatgatgacgcggctggaggagaagtcacggatcaagtgtgatcagtattggcccaacagaggcacggagacctacggcttcatccaggtcacgttgctagataccatcgagctggccacattctgcgtcaggacattctctctgcacaagaatggctccagtgagaaacgcgaggtccgccagttccagtttacggcgtggccggaccatggcgtgcccgaatacccaacgcccttcctggctttcctgcggagagtcaagacctgcaacccaccagatgccggccccatcgtggttcactgcagtgccggtgtgggccgcacaggctgctttatcgtcatcgacgccatgcttgagcggatcaagccagagaagacagtcgatgtctatggccacgtgacgctcatgaggtcccagcgcaactacatggtgcagacggaggaccagtacagcttcatccacgaggccctgctggaggccgtgggctgtggcaacacagaagtgcccgcacgcagcctctatgcctacatccagaagctggcccaggtggagcctggcgaacacgtcactggcatggaactcgagttcaagcggctggctaactccaaggcccacacgtcacgcttcatcagtgccaatctgccttgtaacaagttcaagaaccgcctggtgaacatcatgccctatgagagcacacgggtctgtctgcaacccatccggggtgtggagggctctgactacatcaacgccagcttcattgatggctacaggcagcagaaggcctacatcgcgacacaggggccgctggcggagaccacggaagacttctggcgcatgctgtgggagaacaattcgacgatcgtggtgatgctgaccaagctgcgggagatgggccgggagaagtgtcaccagtactggccggccgagcgctctgcccgctaccagtactttgtggtagatccgatggcagaatacaacatgcctcagtatatcctgcgagagttcaaggtcacagatgcccgggatggccagtcccggactgtccggcagttccagttcacagactggccggaacagggtgtgccaaagtcgggggagggcttcatcgacttcattggccaagtgcataagactaaggagcagtttggccaggacggccccatctctgtccactgcagtgccggcgtgggcaggacgggcgtcttcatcacgcttagcatcgtgctggagcggatgcggtatgaaggcgtggtggacatctttcagacggtgaagatgctacgaacccagcggccggccatggtgcagacagaggatgagtaccagttctgttaccaggcggcactggagtacctcggaagctttgaccactatgcaacctaaagccatggtcccccccaggcccgacaccactggccccggatgcctctgcccctcccgggcggacctcctgaggcctggacccccagtgggcagggcaggaggtggcagcggcagcagctgtgtttctgcaccatttccgaggacgacgcagcccctcgagcccccccaccggccccggccgccccagcgacctccctggcacggccgccgccttcaaatacttggcacattcctcctttccttccaattccaaaaccagattccggggtggggggtggggggatggtgagcaaataggagtgctccccagaaccagaggagggtggggcacagaccatagacggacccctcgtcctcccccagcggtggtagggggacccggggggctcctccccgctctgcacc

SEQ ID NO: 37 - protein, 1912 aa, Homo sapiens
MVHVARLLLLLLTFFLRTDAETPPRFTRTPVDQTGVSGGVASFICQATGDPRPKIVWNKKGKKVSNQRFEVIEFDDGSGSVLRIQPLRTPRDEAIYECVASNNVGEISVSTRLTVLREDQIPRGFPTIDMGPQLKVVERTRTATMLCAASGNPDPEITWFKDFLPVDTSNNNGRIKQLRSESIGGTPIRGALQIEQSEESDQGKYECVATNSAGTRYSAPANLYVRELREVRRVPPRFSIPPTNHEIMPGGSVNITCVAVGSPMPYVKWMLGAEDLTPEDDMPIGRNVLELNDVRQSANYTCVAMSTLGVIEAIAQITVKALPKPPGTPVVTESTATSITLTWDSGNPEPVSYYIIQHKPKNSEELYKEIDGVATTRYSVAGLSPYSDYEFRVVAVNNIGRGPPSEPVLTQTSEQAPSSAPRDVQARMLSSTTILVQWKEPEEPNGQIQGYRVYYTMDPTQHVNNWMKHNVADSQITTIGNLVPQKTYSVKVLAFTSIGDGPLSSDIQVITQTGVPGQPLNFKAEPESETSILLSWTPPRSDTIANYELVYKDGEHGEEQRITIEPGTSYRLQGLKPNSLYYFRLAARSPQGLGASTAEISARTMQSKPSAPPQDISCTSPSSTSILVSWQPPPVEKQNGIITEYSIKYTAVDGEDDKPHEILGIPSDTTKYLLEQLEKWTEYRITVTAHTDVGPGPESLSVLIRTNEDVPSGPPRKVEVEAVNSTSVKVSWRSPVPNKQHGQIRGYQVHYVRMENGEPKGQPMLKDVMLADAQWEFDDTTEHDMIISGLQPETSYSLTVTAYTTKGDGARSKPKLVSTTGAVPGKPRLVINHTQMNTALIQWHPPVDTFGPLQGYRLKFGRKDMEPLTTLEFSEKEDHFTATDIHKGASYVFRLSARNKVGFGEEMVKEISIPEEVPTGFPQNLHSEGTTSTSVQLSWQPPVLAERNGIITKYTLLYRDINIPLLPMEQLIVPADTTMTLTGLKPDTTYDVKVRAHTSKGPGPYSPSVQFRTLPVDQVFAKNFHVKAVMKTSVLLSWEIPENYNSAMPFKILYDDGKMVEEVDGRATQKLIVNLKPEKSYSFVLTNRGNSAGGLQHRVTAKTAPDVLRTKPAFIGKTNLDGMITVQLPEVPANENIKGYYIIIVPLKKSRGKFIKPWESPDEMELDELLKEISRKRRSIRYGREVELKPYIAAHFDVLPTEFTLGDDKHYGGFTNKQLQSGQEYVFFVLAVMEHAESKMYATSPYSDPVVSMDLDPQPITDEEEGLIWVVGPVLAVVFIICIVIAILLYKRKRAESDSRKSSIPNNKEIPSHHPTDPVELRRLNFQTPGMASHPPIPILELADHIERLKANDNLKFSQEYESIDPGQQFTWEHSNLEVNKPKNRYANVIAYDHSRVLLSAIEGIPGSDYVNANYIDGYRKQNAYIATQGSLPETFGDFWRMIWEQRSATVVMMTKLEERSRVKCDQYWPSRGTETHGLVQVTLLDTVELATYCVRTFALYKNGSSEKREVRQFQFTAWPDHGVPEHPTPFLAFLRRVKTCNPPDAGPMVVHCSAGVGRTGCFIVIDAMLERIKHEKTVDIYGHVTLMRAQRNYMVQTEDQYIFIHDALLEAVTCGNTEVPARNLYAYIQKLTQIETGENVTGMELEFKRLASSKAHTSRFISANLPCNKFKNRLVNIMPYESTRVCLQPIRGVEGSDYINASFIDGYRQQKAYIATQGPLAETTEDFWRMLWEHNSTIVVMLTKLREMGREKCHQYWPAERSARYQYFVVDPMAEYNMPQYILREFKVTDARDGQSRTVRQFQFTDWPEQGVPKSGEGFIDFIGQVHKTKEQFGQDGPISVHCSAGVGRTGVFITLSIVLERMRYEGVVDIFQTVKMLRTQRPAMVQTEDQYQFSYRAALEYLGSFDHYAT

SEQ ID NO: 38 - DNA, 6263 bp, Homo sapiens
gctaactcaagggagacgtctggtgaacacccgtgggatctaaagaacaagctctgaaagtgttccagctgaaatttcagatcggacagactcgctgcggctccggaggcagtgattccaagctgctcgcgcacgctgctgccaagctgcaggatggtgcacgtagccaggctgctgctgctgctcctcactttcttcctccgcacggatgctgagacacctccaaggtttacacgaacacccgttgatcagacaggggtctctggcggagttgcctctttcatctgccaagctacgggagacccaagacctaaaattgtctggaacaaaaaaggaaagaaagtcagcaatcagagatttgaggtaatagagtttgacgatgggtctggatcagttctcagaatacaacccttacggactccgagggatgaggccatttatgaatgtgtggcctcaaataatgtgggagaaataagtgtatccaccagactcacagttttgcgggaagatcaaattcccaggggcttccctaccattgacatgggcccacagttgaaggtggttgagcgtactcgcacggccaccatgctttgtgcagccagtggtaatccggatccagaaatcacttggtttaaagatttcttacctgtggacacaagcaacaacaatggtcgtattaagcagttacgatcagaatctattggtggtacaccaataagaggagcccttcagattgagcagagtgaagagtctgaccaaggaaaatatgagtgtgttgccaccaacagcgcgggcactcgctattccgctcctgccaatttatatgtcagagagctgcgagaagttcgccgtgtcccaccaagattctctatcccacccactaatcatgaaatcatgccaggcggaagcgttaatatcacctgtgtggccgtggggtcaccaatgccttatgtaaagtggatgttgggggcagaagatctgacacctgaagatgatatgccaataggaagaaatgtgctagaactgaatgatgtaagacagtcagcaaattacacctgtgttgctatgtcaacactgggtgtcattgaagcaatagcacagatcactgtcaaagccttacccaaacctccaggaactcctgtagtgaccgagagcacagctacaagcatcacactgacgtgggactctgggaaccctgagcctgtttcttattacataattcagcataaacctaaaaactctgaggaactttacaaagaaattgatggggtggcgaccacacgctacagtgtcgctggactaagtccctactcggattatgaattcagggttgttgctgtcaataacattgggcgggggcctcccagcgaacctgtgctaacacaaacctcagagcaagcaccatccagtgccccgagggatgtccaggcacgaatgttgagttcgaccaccattttggtacagtggaaggaacctgaagagccaaatggacagatccaaggatatagagtttattatacaatggatcccactcaacatgtcaacaactggatgaaacacaatgtagctgacagccaaatcactactattggcaacttagtgccccagaaaacatattctgtcaaagtcctggcttttacctcaattggagatggtcccctttcaagtgacatacaagtcatcactcagacaggagtaccagggcagccactaaacttcaaagcagaacctgagtctgaaacaagtattttgctctcttggacacctccacgttcagataccattgccaactatgaactggtctacaaagatggggagcatggagaggagcaacgaattaccattgagccagggacatcatataggctgcaaggactgaaaccaaacagcttatactatttccgtctggctgcacgctcccctcaaggcctgggtgcttctactgcagaaatatcagctagaaccatgcagtcaaagccgtcagctcctcctcaagacattagttgcaccagcccaagttccactagtattttggtaagttggcaacctccaccagtggaaaaacagaatggcattatcactgaatactccatcaagtacactgcagtggatggggaagatgacaagcctcacgagattttgggaattccttcggacactaccaaataccttttggaacagctggaaaaatggactgaataccggatcactgtgacagcccatacagatgtcggccctggccctgagagcttgtccgtgttgattcgaaccaatgaagatgttcctagtggtcctcctcgcaaagtcgaggtagaggctgtcaactcaacatctgttaaagtctcatggcgctcacccgtgcccaataaacagcatggccagataagaggatatcaggtgcattatgtgaggatggaaaatggtgagcccaagggccagcccatgctgaaagatgtcatgctggctgatgcacagtgggaatttgatgatactactgaacatgacatgatcatttctgggctccagcctgaaacttcctactccctcaccgtcacagcctacacaaccaaaggagatggtgctcgcagcaagcccaaactggtgtccaccactggggcagttccagggaaacctcggcttgtgattaaccacactcagatgaatactgctcttattcagtggcaccctccggtggacacatttggacctcttcagggctaccgtctaaaatttggccgcaaggatatggagccacttactactcttgagttctctgaaaaagaagatcactttacagctacagacatccacaagggagcatcatacgtcttcaggctctcagccagaaacaaagtgggctttggggaggagatggtgaaggagatttccattccagaagaagtaccaactggattccctcaaaaccttcactcagaaggcaccacttcaacctccgtccagttatcttggcaaccacctgtcctggcagagagaaatggcattatcaccaagtatacccttctttatagggatatcaacatcccccttctcccgatggagcagcttattgttccagctgacaccactatgacactcactggcttaaaaccagataccacatacgatgtaaaagtacgtgctcatacgagcaaagggcccgggccatatagtcccagtgtccagttcaggacactgcctgtggatcaagtgtttgcaaaaaattttcatgtcaaagcagtaatgaagacttccgtgttgctgtcttgggagattccagagaattataactccgccatgcctttcaaaattctttatgatgatgggaaaatggtagaagaagtggatggccgagccacacagaagttaattgtcaacctgaagcctgagaaatcatattcatttgtgctgacaaatcgtggaaacagtgctggtgggctgcagcacagggtcacggcaaagactgcaccagatgtattacgtaccaagcctgccttcattgggaagaccaacttggatggcatgattactgtgcaactgcctgaagtacctgcaaatgagaatataaaaggttactacataataattgtgcctttgaagaaatctcgcgggaaatttatcaagccatgggagagtccagatgaaatggaattagatgagctgcttaaggagatatctaggaagcgcagaagcatccgttatgggagagaagttgaattaaagccatatattgccgctcactttgatgtccttcccactgagttcaccctgggggatgacaagcattatggtggatttacaaacaagcaactccaaagtggtcaagaatatgtcttctttgtgttagcagtaatggaacatgcagagtctaagatgtatgcaaccagcccttactccgaccccgtggtgtcaatggatctggatccgcagccaatcacggatgaagaagaaggcttgatctgggttgtaggtcctgtccttgcagtggtctttatcatctgcattgtcattgctattcttctttataaaaggaagagggcagagtccgactctagaaaaagcagcataccgaacaataaggagatcccttcacaccacccaacagaccctgtagaactgaggcgccttaactttcaaacaccgggtatggctagccatcctccaatacccatcttggaacttgcagaccacattgaaagattgaaagcaaatgacaacttgaagttttcccaggaatatgagtcaattgaccctggccagcagttcacttgggaacattcaaacttggaagtaaacaaaccaaagaatagatacgcgaatgtaatcgcatatgatcattcccgggttctcctatcagctatagaagggatcccaggaagtgactatgtgaatgccaactacatagatgggtataggaagcaaaatgcctatattgcaacacagggatctctccccgaaacatttggggacttttggagaatgatatgggaacaacggagtgccacagttgtcatgatgacaaaactagaagaaagatcaagggtgaagtgtgaccagtattggcctagcagaggcacagaaacccacggactcgttcaagtaacgctgcttgatactgtggagctggccacatattgtgttcgaacatttgcactttacaagaatggttcaagtgagaagagagaagtgagacaattccagttcaccgcctggcctgatcatggtgttccagaacaccctacaccttttctagctttcttacgtagagtcaaaacctgtaaccctcccgatgctggtccgatggttgtgcactgcagtgcgggagttggccggactggttgcttcatcgtcatagatgccatgttagaaagaataaagcatgaaaaaactgtagatatttatggccatgtaactttaatgagagcccagaggaactatatggttcaaacagaagaccaatacatctttatccatgatgcactgttagaagcagtgacttgtggaaataccgaagtgccagctagaaacttgtatgcctacattcagaagctgacacaaatagaaacgggagagaatgtcacaggaatggagctcgaatttaagcgtctagccagctcaaaagctcacacctcaaggtttatcagtgccaatcttccatgtaataaattcaaaaatcgccttgttaatattatgccatatgaatccacaagggtatgcctgcagcctatccgtggagtagaaggatctgattacatcaatgccagttttattgatggatacagacaacagaaagcctacatcgctacccaggggcccttggcagagaccactgaagacttctggcggatgctctgggaacacaattccaccatagttgtgatgctcaccaagctgcgtgaaatgggcagagagaaatgtcaccaatactggccagcagaacggtctgcaagataccagtactttgttgtagatcccatggctgagtacaacatgccacagtatatcctaagggaattcaaggtcacagatgccagggacggccagtcccgaacagtaaggcagttccagttcactgactggccagagcaaggagtgccaaagtccggagaaggatttattgacttcatcggccaagtccataaaacaaaagaacagtttggccaagatggacccatttcagtccattgcagcgcgggcgttggaagaactggagtcttcataacgctaagcattgttttggaaagaatgagatatgaaggagttgtagatatcttccagactgtcaaaatgttaagaacacaacgaccagctatggtacagacagaggatcaatatcagttttcctatcgtgccgcactagagtacctgggcagctttgaccactatgcaacgtagaaacccctgacccattctggatttttactacaggcccttcaatatccatggagtctcttctgagccatacagggcacttgagaagtccttcttaacttctagctaacaactacttagtgggactattacacacaaaacaaattaaaaacaaattattccaggtggaccaagaattctttgacatcgccccttcccaccatactgctcataataacattttaggggccaaggggagggaatgtttaaaaagaaagtccttgatttagttttttagtattgtaaagatactgctgacctgtgcttcatttctaactgtgtaaacttttttttaacaaaatgtatcattcgataaagtgaattttaaaaaagtt

SEQ ID NO: 39 - protein, 1899 aa, Homo sapiens
MVHVARLLLLLLTFFLRTDAETPPRFTRTPVDQTGVSGGVASFICQATGDPRPKIVWNKKGKKVSNQRFEVIEFDDGSGSVLRIQPLRTPRDEAIYECVASNNVGEISVSTRLTVLREDQIPRGFPTIDMGPQLKVVERTRTATMLCAASGNPDPEITWFKDFLPVDTSNNNGRIKQLRSGALQIEQSEESDQGKYECVATNSAGTRYSAPANLYVRVRRVPPRFSIPPTNHEIMPGGSVNITCVAVGSPMPYVKWMLGAEDLTPEDDMPIGRNVLELNDVRQSANYTCVAMSTLGVIEAIAQITVKALPKPPGTPVVTESTATSITLTWDSGNPEPVSYYIIQHKPKNSEELYKEIDGVATTRYSVAGLSPYSDYEFRVVAVNNIGRGPPSEPVLTQTSEQAPSSAPRDVQARMLSSTTILVQWKEPEEPNGQIQGYRVYYTMDPTQHVNNWMKHNVADSQITTIGNLVPQKTYSVKVLAFTSIGDGPLSSDIQVITQTGVPGQPLNFKAEPESETSILLSWTPPRSDTIANYELVYKDGEHGEEQRITIEPGTSYRLQGLKPNSLYYFRLAARSPQGLGASTAEISARTMQSKPSAPPQDISCTSPSSTSILVSWQPPPVEKQNGIITEYSIKYTAVDGEDDKPHEILGIPSDTTKYLLEQLEKWTEYRITVTAHTDVGPGPESLSVLIRTNEDVPSGPPRKVEVEAVNSTSVKVSWRSPVPNKQHGQIRGYQVHYVRMENGEPKGQPMLKDVMLADAQWEFDDTTEHDMIISGLQPETSYSLTVTAYTTKGDGARSKPKLVSTTGAVPGKPRLVINHTQMNTALIQWHPPVDTFGPLQGYRLKFGRKDMEPLTTLEFSEKEDHFTATDIHKGASYVFRLSARNKVGFGEEMVKEISIPEEVPTGFPQNLHSEGTTSTSVQLSWQPPVLAERNGIITKYTLLYRDINIPLLPMEQLIVPADTTMTLTGLKPDTTYDVKVRAHTSKGPGPYSPSVQFRTLPVDQVFAKNFHVKAVMKTSVLLSWEIPENYNSAMPFKILYDDGKMVEEVDGRATQKLIVNLKPEKSYSFVLTNRGNSAGGLQHRVTAKTAPDVLRTKPAFIGKTNLDGMITVQLPEVPANENIKGYYIIIVPLKKSRGKFIKPWESPDEMELDELLKEISRKRRSIRYGREVELKPYIAAHFDVLPTEFTLGDDKHYGGFTNKQLQSGQEYVFFVLAVMEHAESKMYATSPYSDPVVSMDLDPQPITDEEEGLIWVVGPVLAVVFIICIVIAILLYKRKRAESDSRKSSIPNNKEIPSHHPTDPVELRRLNFQTPGMASHPPIPILELADHIERLKANDNLKFSQEYESIDPGQQFTWEHSNLEVNKPKNRYANVIAYDHSRVLLSAIEGIPGSDYVNANYIDGYRKQNAYIATQGSLPETFGDFWRMIWEQRSATVVMMTKLEERSRVKCDQYWPSRGTETHGLVQVTLLDTVELATYCVRTFALYKNGSSEKREVRQFQFTAWPDHGVPEHPTPFLAFLRRVKTCNPPDAGPMVVHCSAGVGRTGCFIVIDAMLERIKHEKTVDIYGHVTLMRAQRNYMVQTEDQYIFIHDALLEAVTCGNTEVPARNLYAYIQKLTQIETGENVTGMELEFKRLASSKAHTSRFISANLPCNKFKNRLVNIMPYESTRVCLQPIRGVEGSDYINASFIDGYRQQKAYIATQGPLAETTEDFWRMLWEHNSTIVVMLTKLREMGREKCHQYWPAERSARYQYFVVDPMAEYNMPQYILREFKVTDARDGQSRTVRQFQFTDWPEQGVPKSGEGFIDFIGQVHKTKEQFGQDGPISVHCSAGVGRTGVFITLSIVLERMRYEGVVDIFQTVKMLRTQRPAMVQTEDQYQFSYRAALEYLGSFDHYAT

SEQ ID NO: 40 - DNA, 246 bp, Homo sapiens
atgtattttacccctaaagatggtcatgagctctgccatagccaccaatgtcttttgatatggttcactgttcgagatgtagtcttgattggcatgaaaatgagaggttggtccaggagcagtaaagacaaacataatgcacgagctccttcatatatatacaagccattgcattttgtggtctcaagattcttggactcatgcagtcttcggaggatgcagctaaatctgtcattgatgatgtag

SEQ ID NO: 41 - protein, 1903 aa, Homo sapiens
MVHVARLLLLLLTFFLRTDAETPPRFTRTPVDQTGVSGGVASFICQATGDPRPKIVWNKKGKKVSNQRFEVIEFDDGSGSVLRIQPLRTPRDEAIYECVASNNVGEISVSTRLTVLREDQIPRGFPTIDMGPQLKVVERTRTATMLCAASGNPDPEITWFKDFLPVDTSNNNGRIKQLRSESIGGTPIRGALQIEQSEESDQGKYECVATNSAGTRYSAPANLYVRELREVRRVPPRFSIPPTNHEIMPGGSVNITCVAVGSPMPYVKWMLGAEDLTPEDDMPIGRNVLELNDVRQSANYTCVAMSTLGVIEAIAQITVKALPKPPGTPVVTESTATSITLTWDSGNPEPVSYYIIQHKPKNSEELYKEIDGVATTRYSVAGLSPYSDYEFRVVAVNNIGRGPPSEPVLTQTSEQAPSSAPRDVQARMLSSTTILVQWKEPEEPNGQIQGYRVYYTMDPTQHVNNWMKHNVADSQITTIGNLVPQKTYSVKVLAFTSIGDGPLSSDIQVITQTGVPGQPLNFKAEPESETSILLSWTPPRSDTIANYELVYKDGEHGEEQRITIEPGTSYRLQGLKPNSLYYFRLAARSPQGLGASTAEISARTMQSKPSAPPQDISCTSPSSTSILVSWQPPPVEKQNGIITEYSIKYTAVDGEDDKPHEILGIPSDTTKYLLEQLEKWTEYRITVTAHTDVGPGPESLSVLIRTNEDVPSGPPRKVEVEAVNSTSVKVSWRSPVPNKQHGQIRGYQVHYVRMENGEPKGQPMLKDVMLADAQDMIISGLQPETSYSLTVTAYTTKGDGARSKPKLVSTTGAVPGKPRLVINHTQMNTALIQWHPPVDTFGPLQGYRLKFGRKDMEPLTTLEFSEKEDHFTATDIHKGASYVFRLSARNKVGFGEEMVKEISIPEEVPTGFPQNLHSEGTTSTSVQLSWQPPVLAERNGIITKYTLLYRDINIPLLPMEQLIVPADTTMTLTGLKPDTTYDVKVRAHTSKGPGPYSPSVQFRTLPVDQVFAKNFHVKAVMKTSVLLSWEIPENYNSAMPFKILYDDGKMVEEVDGRATQKLIVNLKPEKSYSFVLTNRGNSAGGLQHRVTAKTAPDVLRTKPAFIGKTNLDGMITVQLPEVPANENIKGYYIIIVPLKKSRGKFIKPWESPDEMELDELLKEISRKRRSIRYGREVELKPYIAAHFDVLPTEFTLGDDKHYGGFTNKQLQSGQEYVFFVLAVMEHAESKMYATSPYSDPVVSMDLDPQPITDEEEGLIWVVGPVLAVVFIICIVIAILLYKRKRAESDSRKSSIPNNKEIPSHHPTDPVELRRLNFQTPGMASHPPIPILELADHIERLKANDNLKFSQEYESIDPGQQFTWEHSNLEVNKPKNRYANVIAYDHSRVLLSAIEGIPGSDYVNANYIDGYRKQNAYIATQGSLPETFGDFWRMIWEQRSATVVMMTKLEERSRVKCDQYWPSRGTETHGLVQVTLLDTVELATYCVRTFALYKNGSSEKREVRQFQFTAWPDHGVPEHPTPFLAFLRRVKTCNPPDAGPMVVHCSAGVGRTGCFIVIDAMLERIKHEKTVDIYGHVTLMRAQRNYMVQTEDQYIFIHDALLEAVTCGNTEVPARNLYAYIQKLTQIETGENVTGMELEFKRLASSKAHTSRFISANLPCNKFKNRLVNIMPYESTRVCLQPIRGVEGSDYINASFIDGYRQQKAYIATQGPLAETTEDFWRMLWEHNSTIVVMLTKLREMGREKCHQYWPAERSARYQYFVVDPMAEYNMPQYILREFKVTDARDGQSRTVRQFQFTDWPEQGVPKSGEGFIDFIGQVHKTKEQFGQDGPISVHCSAGVGRTGVFITLSIVLERMRYEGVVDIFQTVKMLRTQRPAMVQTEDQYQFSYRAALEYLGSFDHYAT

SEQ ID NO: 42 - DNA, 6236 bp, Homo sapiens
gctaactcaagggagacgtctggtgaacacccgtgggatctaaagaacaagctctgaaagtgttccagctgaaatttcagatcggacagactcgctgcggctccggaggcagtgattccaagctgctcgcgcacgctgctgccaagctgcaggatggtgcacgtagccaggctgctgctgctgctcctcactttcttcctccgcacggatgctgagacacctccaaggtttacacgaacacccgttgatcagacaggggtctctggcggagttgcctctttcatctgccaagctacgggagacccaagacctaaaattgtctggaacaaaaaaggaaagaaagtcagcaatcagagatttgaggtaatagagtttgacgatgggtctggatcagttctcagaatacaacccttacggactccgagggatgaggccatttatgaatgtgtggcctcaaataatgtgggagaaataagtgtatccaccagactcacagttttgcgggaagatcaaattcccaggggcttccctaccattgacatgggcccacagttgaaggtggttgagcgtactcgcacggccaccatgctttgtgcagccagtggtaatccggatccagaaatcacttggtttaaagatttcttacctgtggacacaagcaacaacaatggtcgtattaagcagttacgatcagaatctattggtggtacaccaataagaggagcccttcagattgagcagagtgaagagtctgaccaaggaaaatatgagtgtgttgccaccaacagcgcgggcactcgctattccgctcctgccaatttatatgtcagagagctgcgagaagttcgccgtgtcccaccaagattctctatcccacccactaatcatgaaatcatgccaggcggaagcgttaatatcacctgtgtggccgtggggtcaccaatgccttatgtaaagtggatgttgggggcagaagatctgacacctgaagatgatatgccaataggaagaaatgtgctagaactgaatgatgtaagacagtcagcaaattacacctgtgttgctatgtcaacactgggtgtcattgaagcaatagcacagatcactgtcaaagccttacccaaacctccaggaactcctgtagtgaccgagagcacagctacaagcatcacactgacgtgggactctgggaaccctgagcctgtttcttattacataattcagcataaacctaaaaactctgaggaactttacaaagaaattgatggggtggcgaccacacgctacagtgtcgctggactaagtccctactcggattatgaattcagggttgttgctgtcaataacattgggcgggggcctcccagcgaacctgtgctaacacaaacctcagagcaagcaccatccagtgccccgagggatgtccaggcacgaatgttgagttcgaccaccattttggtacagtggaaggaacctgaagagccaaatggacagatccaaggatatagagtttattatacaatggatcccactcaacatgtcaacaactggatgaaacacaatgtagctgacagccaaatcactactattggcaacttagtgccccagaaaacatattctgtcaaagtcctggcttttacctcaattggagatggtcccctttcaagtgacatacaagtcatcactcagacaggagtaccagggcagccactaaacttcaaagcagaacctgagtctgaaacaagtattttgctctcttggacacctccacgttcagataccattgccaactatgaactggtctacaaagatggggagcatggagaggagcaacgaattaccattgagccagggacatcatataggctgcaaggactgaaaccaaacagcttatactatttccgtctggctgcacgctcccctcaaggcctgggtgcttctactgcagaaatatcagctagaaccatgcagtcaaagccgtcagctcctcctcaagacattagttgcaccagcccaagttccactagtattttggtaagttggcaacctccaccagtggaaaaacagaatggcattatcactgaatactccatcaagtacactgcagtggatggggaagatgacaagcctcacgagattttgggaattccttcggacactaccaaataccttttggaacagctggaaaaatggactgaataccggatcactgtgacagcccatacagatgtcggccctggccctgagagcttgtccgtgttgattcgaaccaatgaagatgttcctagtggtcctcctcgcaaagtcgaggtagaggctgtcaactcaacatctgttaaagtctcatggcgctcacccgtgcccaataaacagcatggccagataagaggatatcaggtgcattatgtgaggatggaaaatggtgagcccaagggccagcccatgctgaaagatgtcatgctggctgatgcacaggacatgatcatttctgggctccagcctgaaacttcctactccctcaccgtcacagcctacacaaccaaaggagatggtgctcgcagcaagcccaaactggtgtccaccactggggcagttccagggaaacctcggcttgtgattaaccacactcagatgaatactgctcttattcagtggcaccctccggtggacacatttggacctcttcagggctaccgtctaaaatttggccgcaaggatatggagccacttactactcttgagttctctgaaaaagaagatcactttacagctacagacatccacaagggagcatcatacgtcttcaggctctcagccagaaacaaagtgggctttggggaggagatggtgaaggagatttccattccagaagaagtaccaactggattccctcaaaaccttcactcagaaggcaccacttcaacctccgtccagttatcttggcaaccacctgtcctggcagagagaaatggcattatcaccaagtatacccttctttatagggatatcaacatcccccttctcccgatggagcagcttattgttccagctgacaccactatgacactcactggcttaaaaccagataccacatacgatgtaaaagtacgtgctcatacgagcaaagggcccgggccatatagtcccagtgtccagttcaggacactgcctgtggatcaagtgtttgcaaaaaattttcatgtcaaagcagtaatgaagacttccgtgttgctgtcttgggagattccagagaattataactccgccatgcctttcaaaattctttatgatgatgggaaaatggtagaagaagtggatggccgagccacacagaagttaattgtcaacctgaagcctgagaaatcatattcatttgtgctgacaaatcgtggaaacagtgctggtgggctgcagcacagggtcacggcaaagactgcaccagatgtattacgtaccaagcctgccttcattgggaagaccaacttggatggcatgattactgtgcaactgcctgaagtacctgcaaatgagaatataaaaggttactacataataattgtgcctttgaagaaatctcgcgggaaatttatcaagccatgggagagtccagatgaaatggaattagatgagctgcttaaggagatatctaggaagcgcagaagcatccgttatgggagagaagttgaattaaagccatatattgccgctcactttgatgtccttcccactgagttcaccctgggggatgacaagcattatggtggatttacaaacaagcaactccaaagtggtcaagaatatgtcttctttgtgttagcagtaatggaacatgcagagtctaagatgtatgcaaccagcccttactccgaccccgtggtgtcaatggatctggatccgcagccaatcacggatgaagaagaaggcttgatctgggttgtaggtcctgtccttgcagtggtctttatcatctgcattgtcattgctattcttctttataaaaggaagagggcagagtccgactctagaaaaagcagcataccgaacaataaggagatcccttcacaccacccaacagaccctgtagaactgaggcgccttaactttcaaacaccgggtatggctagccatcctccaatacccatcttggaacttgcagaccacattgaaagattgaaagcaaatgacaacttgaagttttcccaggaatatgagtcaattgaccctggccagcagttcacttgggaacattcaaacttggaagtaaacaaaccaaagaatagatacgcgaatgtaatcgcatatgatcattcccgggttctcctatcagctatagaagggatcccaggaagtgactatgtgaatgccaactacatagatgggtataggaagcaaaatgcctatattgcaacacagggatctctccccgaaacatttggggacttttggagaatgatatgggaacaacggagtgccacagttgtcatgatgacaaaactagaagaaagatcaagggtgaagtgtgaccagtattggcctagcagaggcacagaaacccacggactcgttcaagtaacgctgcttgatactgtggagctggccacatattgtgttcgaacatttgcactttacaagaatggttcaagtgagaagagagaagtgagacaattccagttcaccgcctggcctgatcatggtgttccagaacaccctacaccttttctagctttcttacgtagagtcaaaacctgtaaccctcccgatgctggtccgatggttgtgcactgcagtgcgggagttggccggactggttgcttcatcgtcatagatgccatgttagaaagaataaagcatgaaaaaactgtagatatttatggccatgtaactttaatgagagcccagaggaactatatggttcaaacagaagaccaatacatctttatccatgatgcactgttagaagcagtgacttgtggaaataccgaagtgccagctagaaacttgtatgcctacattcagaagctgacacaaatagaaacgggagagaatgtcacaggaatggagctcgaatttaagcgtctagccagctcaaaagctcacacctcaaggtttatcagtgccaatcttccatgtaataaattcaaaaatcgccttgttaatattatgccatatgaatccacaagggtatgcctgcagcctatccgtggagtagaaggatctgattacatcaatgccagttttattgatggatacagacaacagaaagcctacatcgctacccaggggcccttggcagagaccactgaagacttctggcggatgctctgggaacacaattccaccatagttgtgatgctcaccaagctgcgtgaaatgggcagagagaaatgtcaccaatactggccagcagaacggtctgcaagataccagtactttgttgtagatcccatggctgagtacaacatgccacagtatatcctaagggaattcaaggtcacagatgccagggacggccagtcccgaacagtaaggcagttccagttcactgactggccagagcaaggagtgccaaagtccggagaaggatttattgacttcatcggccaagtccataaaacaaaagaacagtttggccaagatggacccatttcagtccattgcagcgcgggcgttggaagaactggagtcttcataacgctaagcattgttttggaaagaatgagatatgaaggagttgtagatatcttccagactgtcaaaatgttaagaacacaacgaccagctatggtacagacagaggatcaatatcagttttcctatcgtgccgcactagagtacctgggcagctttgaccactatgcaacgtagaaacccctgacccattctggatttttactacaggcccttcaatatccatggagtctcttctgagccatacagggcacttgagaagtccttcttaacttctagctaacaactacttagtgggactattacacacaaaacaaattaaaaacaaattattccaggtggaccaagaattctttgacatcgccccttcccaccatactgctcataataacattttaggggccaaggggagggaatgtttaaaaagaaagtccttgatttagttttttagtattgtaaagatactgctgacctgtgcttcatttctaactgtgtaaacttttttttaacaaaatgtatcattcgataaagtgaattttaaaaaagtt

SEQ ID NO: 43 - protein, 1501 aa, Homo sapiens
MVHVARLLLLLLTFFLRTDAETPPRFTRTPVDQTGVSGGVASFICQATGDPRPKIVWNKKGKKVSNQRFEVIEFDDGSGSVLRIQPLRTPRDEAIYECVASNNVGEISVSTRLTVLREDQIPRGFPTIDMGPQLKVVERTRTATMLCAASGNPDPEITWFKDFLPVDTSNNNGRIKQLRSESIGGTPIRGALQIEQSEESDQGKYECVATNSAGTRYSAPANLYVRELREVRRVPPRFSIPPTNHEIMPGGSVNITCVAVGSPMPYVKWMLGAEDLTPEDDMPIGRNVLELNDVRQSANYTCVAMSTLGVIEAIAQITVKALPKPPGTPVVTESTATSITLTWDSGNPEPVSYYIIQHKPKNSEELYKEIDGVATTRYSVAGLSPYSDYEFRVVAVNNIGRGPPSEPVLTQTSEQAPSSAPRDVQARMLSSTTILVQWKEPEEPNGQIQGYRVYYTMDPTQHVNNWMKHNVADSQITTIGNLVPQKTYSVKVLAFTSIGDGPLSSDIQVITQTGVPGQPLNFKAEPESETSILLSWTPPRSDTIANYELVYKDGEHGEEQRITIEPGTSYRLQGLKPNSLYYFRLAARSPQGLGASTAEISARTMQSMFAKNFHVKAVMKTSVLLSWEIPENYNSAMPFKILYDDGKMVEEVDGRATQKLIVNLKPEKSYSFVLTNRGNSAGGLQHRVTAKTAPDVLRTKPAFIGKTNLDGMITVQLPEVPANENIKGYYIIIVPLKKSRGKFIKPWESPDEMELDELLKEISRKRRSIRYGREVELKPYIAAHFDVLPTEFTLGDDKHYGGFTNKQLQSGQEYVFFVLAVMEHAESKMYATSPYSDPVVSMDLDPQPITDEEEGLIWVVGPVLAVVFIICIVIAILLYKRKRAESDSRKSSIPNNKEIPSHHPTDPVELRRLNFQTPGMASHPPIPILELADHIERLKANDNLKFSQEYESIDPGQQFTWEHSNLEVNKPKNRYANVIAYDHSRVLLSAIEGIPGSDYVNANYIDGYRKQNAYIATQGSLPETFGDFWRMIWEQRSATVVMMTKLEERSRVKCDQYWPSRGTETHGLVQVTLLDTVELATYCVRTFALYKNGSSEKREVRQFQFTAWPDHGVPEHPTPFLAFLRRVKTCNPPDAGPMVVHCSAGVGRTGCFIVIDAMLERIKHEKTVDIYGHVTLMRAQRNYMVQTEDQYIFIHDALLEAVTCGNTEVPARNLYAYIQKLTQIETGENVTGMELEFKRLASSKAHTSRFISANLPCNKFKNRLVNIMPYESTRVCLQPIRGVEGSDYINASFIDGYRQQKAYIATQGPLAETTEDFWRMLWEHNSTIVVMLTKLREMGREKCHQYWPAERSARYQYFVVDPMAEYNMPQYILREFKVTDARDGQSRTVRQFQFTDWPEQGVPKSGEGFIDFIGQVHKTKEQFGQDGPISVHCSAGVGRTGVFITLSIVLERMRYEGVVDIFQTVKMLRTQRPAMVQTEDQYQFSYRAALEYLGSFDHYAT

SEQ ID NO: 44 - DNA, 5030 bp, Homo sapiens
gctaactcaagggagacgtctggtgaacacccgtgggatctaaagaacaagctctgaaagtgttccagctgaaatttcagatcggacagactcgctgcggctccggaggcagtgattccaagctgctcgcgcacgctgctgccaagctgcaggatggtgcacgtagccaggctgctgctgctgctcctcactttcttcctccgcacggatgctgagacacctccaaggtttacacgaacacccgttgatcagacaggggtctctggcggagttgcctctttcatctgccaagctacgggagacccaagacctaaaattgtctggaacaaaaaaggaaagaaagtcagcaatcagagatttgaggtaatagagtttgacgatgggtctggatcagttctcagaatacaacccttacggactccgagggatgaggccatttatgaatgtgtggcctcaaataatgtgggagaaataagtgtatccaccagactcacagttttgcgggaagatcaaattcccaggggcttccctaccattgacatgggcccacagttgaaggtggttgagcgtactcgcacggccaccatgctttgtgcagccagtggtaatccggatccagaaatcacttggtttaaagatttcttacctgtggacacaagcaacaacaatggtcgtattaagcagttacgatcagaatctattggtggtacaccaataagaggagcccttcagattgagcagagtgaagagtctgaccaaggaaaatatgagtgtgttgccaccaacagcgcgggcactcgctattccgctcctgccaatttatatgtcagagagctgcgagaagttcgccgtgtcccaccaagattctctatcccacccactaatcatgaaatcatgccaggcggaagcgttaatatcacctgtgtggccgtggggtcaccaatgccttatgtaaagtggatgttgggggcagaagatctgacacctgaagatgatatgccaataggaagaaatgtgctagaactgaatgatgtaagacagtcagcaaattacacctgtgttgctatgtcaacactgggtgtcattgaagcaatagcacagatcactgtcaaagccttacccaaacctccaggaactcctgtagtgaccgagagcacagctacaagcatcacactgacgtgggactctgggaaccctgagcctgtttcttattacataattcagcataaacctaaaaactctgaggaactttacaaagaaattgatggggtggcgaccacacgctacagtgtcgctggactaagtccctactcggattatgaattcagggttgttgctgtcaataacattgggcgggggcctcccagcgaacctgtgctaacacaaacctcagagcaagcaccatccagtgccccgagggatgtccaggcacgaatgttgagttcgaccaccattttggtacagtggaaggaacctgaagagccaaatggacagatccaaggatatagagtttattatacaatggatcccactcaacatgtcaacaactggatgaaacacaatgtagctgacagccaaatcactactattggcaacttagtgccccagaaaacatattctgtcaaagtcctggcttttacctcaattggagatggtcccctttcaagtgacatacaagtcatcactcagacaggagtaccagggcagccactaaacttcaaagcagaacctgagtctgaaacaagtattttgctctcttggacacctccacgttcagataccattgccaactatgaactggtctacaaagatggggagcatggagaggagcaacgaattaccattgagccagggacatcatataggctgcaaggactgaaaccaaacagcttatactatttccgtctggctgcacgctcccctcaaggcctgggtgcttctactgcagaaatatcagctagaaccatgcagtcaatgtttgcaaaaaattttcatgtcaaagcagtaatgaagacttccgtgttgctgtcttgggagattccagagaattataactccgccatgcctttcaaaattctttatgatgatgggaaaatggtagaagaagtggatggccgagccacacagaagttaattgtcaacctgaagcctgagaaatcatattcatttgtgctgacaaatcgtggaaacagtgctggtgggctgcagcacagggtcacggcaaagactgcaccagatgtattacgtaccaagcctgccttcattgggaagaccaacttggatggcatgattactgtgcaactgcctgaagtacctgcaaatgagaatataaaaggttactacataataattgtgcctttgaagaaatctcgcgggaaatttatcaagccatgggagagtccagatgaaatggaattagatgagctgcttaaggagatatctaggaagcgcagaagcatccgttatgggagagaagttgaattaaagccatatattgccgctcactttgatgtccttcccactgagttcaccctgggggatgacaagcattatggtggatttacaaacaagcaactccaaagtggtcaagaatatgtcttctttgtgttagcagtaatggaacatgcagagtctaagatgtatgcaaccagcccttactccgaccccgtggtgtcaatggatctggatccgcagccaatcacggatgaagaagaaggcttgatctgggttgtaggtcctgtccttgcagtggtctttatcatctgcattgtcattgctattcttctttataaaaggaagagggcagagtccgactctagaaaaagcagcataccgaacaataaggagatcccttcacaccacccaacagaccctgtagaactgaggcgccttaactttcaaacaccgggtatggctagccatcctccaatacccatcttggaacttgcagaccacattgaaagattgaaagcaaatgacaacttgaagttttcccaggaatatgagtcaattgaccctggccagcagttcacttgggaacattcaaacttggaagtaaacaaaccaaagaatagatacgcgaatgtaatcgcatatgatcattcccgggttctcctatcagctatagaagggatcccaggaagtgactatgtgaatgccaactacatagatgggtataggaagcaaaatgcctatattgcaacacagggatctctccccgaaacatttggggacttttggagaatgatatgggaacaacggagtgccacagttgtcatgatgacaaaactagaagaaagatcaagggtgaagtgtgaccagtattggcctagcagaggcacagaaacccacggactcgttcaagtaacgctgcttgatactgtggagctggccacatattgtgttcgaacatttgcactttacaagaatggttcaagtgagaagagagaagtgagacaattccagttcaccgcctggcctgatcatggtgttccagaacaccctacaccttttctagctttcttacgtagagtcaaaacctgtaaccctcccgatgctggtccgatggttgtgcactgcagtgcgggagttggccggactggttgcttcatcgtcatagatgccatgttagaaagaataaagcatgaaaaaactgtagatatttatggccatgtaactttaatgagagcccagaggaactatatggttcaaacagaagaccaatacatctttatccatgatgcactgttagaagcagtgacttgtggaaataccgaagtgccagctagaaacttgtatgcctacattcagaagctgacacaaatagaaacgggagagaatgtcacaggaatggagctcgaatttaagcgtctagccagctcaaaagctcacacctcaaggtttatcagtgccaatcttccatgtaataaattcaaaaatcgccttgttaatattatgccatatgaatccacaagggtatgcctgcagcctatccgtggagtagaaggatctgattacatcaatgccagttttattgatggatacagacaacagaaagcctacatcgctacccaggggcccttggcagagaccactgaagacttctggcggatgctctgggaacacaattccaccatagttgtgatgctcaccaagctgcgtgaaatgggcagagagaaatgtcaccaatactggccagcagaacggtctgcaagataccagtactttgttgtagatcccatggctgagtacaacatgccacagtatatcctaagggaattcaaggtcacagatgccagggacggccagtcccgaacagtaaggcagttccagttcactgactggccagagcaaggagtgccaaagtccggagaaggatttattgacttcatcggccaagtccataaaacaaaagaacagtttggccaagatggacccatttcagtccattgcagcgcgggcgttggaagaactggagtcttcataacgctaagcattgttttggaaagaatgagatatgaaggagttgtagatatcttccagactgtcaaaatgttaagaacacaacgaccagctatggtacagacagaggatcaatatcagttttcctatcgtgccgcactagagtacctgggcagctttgaccactatgcaacgtagaaacccctgacccattctggatttttactacaggcccttcaatatccatggagtctcttctgagccatacagggcacttgagaagtccttcttaacttctagctaacaactacttagtgggactattacacacaaaacaaattaaaaacaaattattccaggtggaccaagaattctttgacatcgccccttcccaccatactgctcataataacattttaggggccaaggggagggaatgtttaaaaagaaagtccttgatttagttttttagtattgtaaagatactgctgacctgtgcttcatttctaactgtgtaaacttttttttaacaaaatgtatcattcgataaagtgaattttaaaaaagtt

SEQ ID NO: 45 - protein, 14 aa, Artificial Sequence
  RPTP sigma fragment
SIGQGPPSESVVTR

SEQ ID NO: 46 - protein, 22 aa, Artificial Sequence
  RPTP sigma fragment
HNVDDSLLTTVGSLLEDETYVR

SEQ ID NO: 47 - protein, 19 aa, Artificial Sequence
  RPTP sigma fragment
VLAFTSVGDGPLSDPIQVK

SEQ ID NO: 48 - protein, 15 aa, Artificial Sequence
  RPTP sigma fragment
TEVGPGPESSPVVVR

SEQ ID NO: 49 - protein, 16 aa, Artificial Sequence
  RPTP sigma fragment
WEPPAGTAEDQVLGYR

SEQ ID NO: 50 - protein, 20 aa, Artificial Sequence
  RPTP sigma fragment
TSVLLSWEFPDNYNSPTPYK

SEQ ID NO: 51 - protein, 15 aa, Artificial Sequence
  RPTP sigma fragment
TEVGPGPESSPVVVR

SEQ ID NO: 52 - protein, 15 aa, Artificial Sequence
  RPTP delta Ig domain
FEVIEFDDGSGSVLR

SEQ ID NO: 53 - protein, 16 aa, Artificial Sequence
  RPTP delta Ig domain
SGALQIEQSEESDQGK

SEQ ID NO: 54 - protein, 9 aa, Artificial Sequence
  RPTP delta Ig domain
YSAPANLYV

SEQ ID NO: 55 - protein, 18 aa, Artificial Sequence
  RPTP delta Ig domain
WMLGAEDLTPEDDMPIGR

SEQ ID NO: 56 - protein, 9 aa, Artificial Sequence
  RPTP delta Ig domain
NVLELNDVR

SEQ ID NO: 57 - protein, 21 aa, Artificial Sequence
  RPTP delta fragment
GPPSEPVLTQTSEQAPSSAPR

SEQ ID NO: 58 - protein, 15 aa, Artificial Sequence
  RPTP delta fragment
SPQGLGASTAEISAR

SEQ ID NO: 59 - protein, 23 aa, Artificial Sequence
  RPTP delta fragment
YTAVDGEDDKPHEILGIPSDTTK

SEQ ID NO: 60 - protein, 9 aa, Artificial Sequence
  RPTP delta fragment
VGFGEEMVK

SEQ ID NO: 61 - protein, 12 aa, Artificial Sequence
  RPTP delta fragment
GPGPYSPSVQFR

SEQ ID NO: 62 - protein, 8 aa, Artificial Sequence
  FLAG tag sequence
DYKDDDDK

SEQ ID NO: 63 - protein, 8 aa, Artificial Sequence
  XPRESS epitope tag
DLYDDDDK

SEQ ID NO: 64 - protein, 1948 aa, Homo sapiens; identical to SEQ ID NO: 29

SEQ ID NO: 65 - DNA, 6412 bp, Homo sapiens
gcggtggcggcggcagaggcggcggctccagcttcggctccggctcgggctcgggctccggctccggctccggctccggctccagctcgggtggcggtggcgggagcgggaccaggtggaggcggcggcggcagaggagtgggagcagcggccctagcggcttgcggggggacatgcggaccgacggcccctggataggcggaaggagtggaggccctggtgcccggcccttggtgctgagtatccagcaagagtgaccggggtgaagaagcaaagactcggttgattgtcctgggctgtggctggctgtggagctagagccctggatggcccctgagccagccccagggaggacgatggtgccccttgtgcctgcactggtgatgcttggtttggtggcaggcgcccatggtgacagcaaacctgtcttcattaaagtccctgaggaccagactgggctgtcaggaggggtagcctccttcgtgtgccaagctacaggagaacccaagccgcgcatcacatggatgaagaaggggaagaaagtcagctcccagcgcttcgaggtcattgagtttgatgatggggcagggtcagtgcttcggatccagccattgcgggtgcagcgagatgaagccatctatgagtgtacagctactaacagcctgggtgagatcaacactagtgccaagctctcagtgctcgaagaggaacagctgccccctgggttcccttccatcgacatggggcctcagctgaaggtggtggagaaggcacgcacagccaccatgctatgtgccgcaggcggaaatccagaccctgagatttcttggttcaaggacttccttcctgtagaccctgccacgagcaacggccgcatcaagcagctgcgttcaggtgccttgcagatagagagcagtgaggaatccgaccaaggcaagtacgagtgtgtggcgaccaactcggcaggcacacgttactcagcccctgcgaacctgtatgtgcgagtgcgccgcgtggctcctcgtttctccatccctcccagcagccaggaggtgatgccaggcggcagcgtgaacctgacatgcgtggcagtgggtgcacccatgccctacgtgaagtggatgatgggggccgaggagctcaccaaggaggatgagatgccagttggccgcaacgtcctggagctcagcaatgtcgtacgctctgccaactacacctgtgtggccatctcctcgctgggcatgatcgaggccacagcccaggtcacagtgaaagctcttccaaagcctccgattgatcttgtggtgacagagacaactgccaccagtgtcaccctcacctgggactctgggaactcggagcctgtaacctactatggcatccagtaccgcgcagcgggcacggagggcccctttcaggaggtggatggtgtggccaccacccgctacagcattggcggcctcagccctttctcggaatatgccttccgcgtgctggcggtgaacagcatcgggcgagggccgcccagcgaggcagtgcgggcacgcacgggagaacaggcgccctccagcccaccgcgccgcgtgcaggcacgcatgctgagcgccagcaccatgctggtgcagtgggagcctcccgaggagcccaacggcctggtgcggggataccgcgtctactatactccggactcccgccgccccccgaacgcctggcacaagcacaacaccgacgcggggctcctcacgaccgtgggcagcctgctgcctggcatcacctacagcctgcgcgtgcttgccttcaccgccgtgggcgatggccctcccagccccaccatccaggtcaagacgcagcagggagtgcctgcccagcccgcggacttccaggccgaggtggagtcggacaccaggatccagctctcgtggctgctgccccctcaggagcggatcatcatgtatgaactggtgtactgggcggcagaggacgaagaccaacagcacaaggtgaccttcgacccaacctcctcctacacactagaggacctgaagcctgacacactctaccgcttccagctggctgcacgctcggatatgggggtgggcgtcttcacccccaccattgaggcccgcacagcccagtccaccccctccgcccctccccagaaggtgatgtgtgtgagcatgggctccaccacggtccgggtaagttgggtcccgccgcctgccgacagccgcaacggcgttatcacccagtactccgtggcctacgaggcggtggacggcgaggaccgcgggcggcatgtggtggatggcatcagccgtgagcactccagctgggacctggtgggcctggagaagtggacggagtaccgggtgtgggtgcgggcacacacagacgtgggccccggccccgagagcagcccggtgctggtgcgcaccgatgaggacgtgcccagcgggcctccgcggaaggtggaggtggagccactgaactccactgctgtgcatgtctactggaagctgcctgtccccagcaagcagcatggccagatccgcggctaccaggtcacctacgtgcggctggagaatggcgagccccgtggactccccatcatccaagacgtcatgctagccgaggcccaggaaaccactatcagcggcctgaccccggagaccacctactccgttactgttgctgcctataccaccaagggggatggtgcccgcagcaagcccaaaattgtcactacaacaggtgcagtcccaggccggcccaccatgatgatcagcaccacggccatgaacactgcgctgctccagtggcacccacccaaggaactgcctggcgagctgctgggctaccggctgcagtactgccgggccgacgaggcgcggcccaacaccatagatttcggcaaggatgaccagcacttcacagtcaccggcctgcacaaggggaccacctacatcttccggcttgctgccaagaaccgggctggcttgggtgaggagttcgagaaggagatcaggacccccgaggacctgcccagcggcttcccccaaaacctgcatgtgacaggactgaccacgtctaccacagaactggcctgggacccgccagtgctggcggagaggaacgggcgcatcatcagctacaccgtggtgttccgagacatcaacagccaacaggagctgcagaacatcacgacagacacccgctttacccttactggcctcaagccagacaccacttacgacatcaaggtccgcgcatggaccagcaaaggctctggcccactcagccccagcatccagtcccggaccatgccggtggagcaagtgtttgccaagaacttccgggtggcggctgcaatgaagacgtctgtgctgctcagctgggaggttcccgactcctataagtcagctgtgccctttaagattctgtacaatgggcagagtgtggaggtggacgggcactcgatgcggaagctgatcgcagacctgcagcccaacacagagtactcgtttgtgctgatgaaccgtggcagcagcgcagggggcctgcagcacctggtgtccatccgcacagcccccgacctcctgcctcacaagccgctgcctgcctctgcctacatagaggacggccgcttcgatctctccatgccccatgtgcaagacccctcgcttgtcaggtggttctacattgttgtggtgcccattgaccgtgtgggcgggagcatgctgacgccaaggtggagcacacccgaggaactggagctggacgagcttctagaagccatcgagcaaggcggagaggagcagcggcggcggcggcggcaggcagaacgtctgaagccatatgtggctgctcaactggatgtgctcccggagacctttaccttgggggacaagaagaactaccggggcttctacaaccggcccctgtctccggacttgagctaccagtgctttgtgcttgcctccttgaaggaacccatggaccagaagcgctatgcctccagcccctactcggatgagatcgtggtccaggtgacaccagcccagcagcaggaggagccggagatgctgtgggtgacgggtcccgtgctggcagtcatcctcatcatcctcattgtcatcgccatcctcttgttcaaaaggaaaaggacccactctccgtcctctaaggatgagcagtcgatcggactgaaggactccttgctggcccactcctctgaccctgtggagatgcggaggctcaactaccagaccccaggtatgcgagaccacccacccatccccatcaccgacctggcggacaacatcgagcgcctcaaagccaacgatggcctcaagttctcccaggagtatgagtccatcgaccctggacagcagttcacgtgggagaattcaaacctggaggtgaacaagcccaagaaccgctatgcgaatgtcatcgcctacgaccactctcgagtcatccttacctctatcgatggcgtccccgggagtgactacatcaatgccaactacatcgatggctaccgcaagcagaatgcctacaccgccacgcagggccccctgcccgagaccatgggtgatttctggaggatggtgtgggaacagcgcacggccactgtggtcatgatgacacggctggaggagaagtcccgggtaaaatgtgatcagtactggccagcccgtggcaccgagacctgtggccttattcaggtgaccctgttggacacagtggagctggccacatacactgtgcgcaccttcgcactccacaagagtggctccagtgagaagcgcgagctgcgtcagtttcagttcatggcctggccagaccatggagttcctgagtacccaactcccatcctggccttcctacgacgggtcaaggcctgcaaccccctagacgcagggcccatggtggtgcactgcagcgcgggcgtgggccgcaccggctgcttcatcgtgattgatgccatgttggagcggatgaagcacgagaagacggtggacatctatggccacgtgacctgcatgcgatcacagaggaactacatggtgcagacggaggaccagtacgtgttcatccatgaggcgctgctggaggctgccacgtgcggccacacagaggtgcctgcccgcaacctgtatgcccacatccagaagctgggccaagtgcctccaggggagagtgtgaccgccatggagctcgagttcaagttgctggccagctccaaggcccacacgtcccgcttcatcagcgccaacctgccctgcaacaagttcaagaaccggctggtgaacatcatgccctacgaattgacccgtgtgtgtctgcagcccatccgtggtgtggagggctctgactacatcaatgccagcttcctggatggttatagacagcagaaggcctacatagctacacaggggcctctggcagagagcaccgaggacttctggcgcatgctatgggagcacaattccaccatcatcgtcatgctgaccaagcttcgggagatgggcagggagaaatgccaccagtactggccagcagagcgctctgctcgctaccagtactttgttgttgacccgatggctgagtacaacatgccccagtatatcctgcgtgagttcaaggtcacggatgcccgggatgggcagtcaaggacaatccggcagttccagttcacagactggccagagcagggcgtgcccaagacaggcgagggattcattgacttcatcgggcaggtgcataagaccaaggagcagtttggacaggatgggcctatcacggtgcactgcagtgctggcgtgggccgcaccggggtgttcatcactctgagcatcgtcctggagcgcatgcgctacgagggcgtggtcgacatgtttcagaccgtgaagaccctgcgtacacagcgtcctgccatggtgcagacagaggaccagtatcagctgtgctaccgtgcggccctggagtacctcggcagctttgaccactatgcaacgtaactaccgctcccctctcctccgccacccccgccgtggggctccggaggggacccagctcctctgagccataccgaccatcgtccagccctcctacgcagatgctgtcactggcagagcacagcccacggggatcacagcgtttcaggaacgttgccacaccaatcagagagcctagaacatccctgggcaagtggatggcccagcaggcaggcactgtggcccttctgtccaccagacccacctggagcccgcttcaagctctctgttgcgctcccgcatttctcatgcttcttctcatggggtggggttggggcaaagcctcctttttaatacattaagtggggtagactgaggaaaaaaaaaaaaaaaaaaaaaaaaaaaaaaaaaaa

SEQ ID NO: 66 - protein, 277 aa, Variola virus; identical to SEQ ID NO: 11

SEQ ID NO: 67 - protein, 8 aa, Artificial Sequence
  HA epitope
YPYDVDYA

SEQ ID NO: 68 - protein, 12 aa, Artificial Sequence
  Protein C tag
EDQVDPRLIDGK

SEQ ID NO: 69 - protein, 8 aa, Artificial Sequence
  HRV3C protease site
LEVLFQGP

SEQ ID NO: 70 - protein, 1897 aa, Homo sapiens
MAPEPAPGRTMVPLVPALVMLGLVAGAHGDSKPVFIKVPEDQTGLSGGVASFVCQATGEPKPRITWMKKGKKVSSQRFEVIEFDDGAGSVLRIQPLRVQRDEAIYECTATNSLGEINTSAKLSVLEEEQLPPGFPSIDMGPQLKVVEKARTATMLCAAGGNPDPEISWFKDFLPVDPATSNGRIKQLRSGALQIESSEESDQGKYECVATNSAGTRYSAPANLYVRVRRVAPRFSIPPSSQEVMPGGSVNLTCVAVGAPMPYVKWMMGAEELTKEDEMPVGRNVLELSNVVRSANYTCVAISSLGMIEATAQVTVKALPKPPIDLVVTETTATSVTLTWDSGNSEPVTYYGIQYRAAGTEGPFQEVDGVATTRYSIGGLSPFSEYAFRVLAVNSIGRGPPSEAVRARTGEQAPSSPPRRVQARMLSASTMLVQWEPPEEPNGLVRGYRVYYTPDSRRPPNAWHKHNTDAGLLTTVGSLLPGITYSLRVLAFTAVGDGPPSPTIQVKTQQGVPAQPADFQAEVESDTRIQLSWLLPPQERIIMYELVYWAAEDEDQQHKVTFDPTSSYTLEDLKPDTLYRFQLAARSDMGVGVFTPTIEARTAQSTPSAPPQKVMCVSMGSTTVRVSWVPPPADSRNGVITQYSVAYEAVDGEDRGRHVVDGISREHSSWDLVGLEKWTEYRVWVRAHTDVGPGPESSPVLVRTDEDVPSGPPRKVEVEPLNSTAVHVYWKLPVPSKQHGQIRGYQVTYVRLENGEPRGLPIIQDVMLAEAQETTISGLTPETTYSVTVAAYTTKGDGARSKPKIVTTTGAVPGRPTMMISTTAMNTALLQWHPPKELPGELLGYRLQYCRADEARPNTIDFGKDDQHFTVTGLHKGTTYIFRLAAKNRAGLGEEFEKEIRTPEDLPSGFPQNLHVTGLTTSTTELAWDPPVLAERNGRIISYTVVFRDINSQQELQNITTDTRFTLTGLKPDTTYDIKVRAWTSKGSGPLSPSIQSRTMPVEQVFAKNFRVAAAMKTSVLLSWEVPDSYKSAVPFKILYNGQSVEVDGHSMRKLIADLQPNTEYSFVLMNRGSSAGGLQHLVSIRTAPDLLPHKPLPASAYIEDGRFDLSMPHVQDPSLVRWFYIVVVPIDRVGGSMLTPRWSTPEELELDELLEAIEQGGEEQRRRRRQAERLKPYVAAQLDVLPETFTLGDKKNYRGFYNRPLSPDLSYQCFVLASLKEPMDQKRYASSPYSDEIVVQVTPAQQQEEPEMLWVTGPVLAVILIILIVIAILLFKRKRTHSPSSKDEQSIGLKDSLLAHSSDPVEMRRLNYQTPGMRDHPPIPITDLADNIERLKANDGLKFSQEYESIDPGQQFTWENSNLEVNKPKNRYANVIAYDHSRVILTSIDGVPGSDYINANYIDGYRKQNAYIATQGPLPETMGDFWRMVWEQRTATVVMMTRLEEKSRVKCDQYWPARGTETCGLIQVTLLDTVELATYTVRTFALHKSGSSEKRELRQFQFMAWPDHGVPEYPTPILAFLRRVKACNPLDAGPMVVHCSAGVGRTGCFIVIDAMLERMKHEKTVDIYGHVTCMRSQRNYMVQTEDQYVFIHEALLEAATCGHTEVPARNLYAHIQKLGQVPPGESVTAMELEFKLLASSKAHTSRFISANLPCNKFKNRLVNIMPYELTRVCLQPIRGVEGSDYINASFLDGYRQQKAYIATQGPLAESTEDFWRMLWEHNSTIIVMLTKLREMGREKCHQYWPAERSARYQYFVVDPMAEYNMPQYILREFKVTDARDGQSRTIRQFQFTDWPEQGVPKTGEGFIDFIGQVHKTKEQFGQDGPITVHCSAGVGRTGVFITLSIVLERMRYEGVVDMFQTVKTLRTQRPAMVQTEDQYQCYRAALEYLGSFDHYAT

SEQ ID NO: 71 - protein, 1948 aa, Homo sapiens
MAPTWGPGMVSVVGPMGLLVVLLVGGCAAEEPPRFIKEPKDQIGVSGGVASFVCQATGDPKPRVTWNKKGKKVNSQRFETIEFDESAGAVLRIQPLRTPRDENVYECVAQNSVGEITVHAKLTVLREDQLPSGFPNIDMGPQLKVVERTRTATMLCAASGNPDPEITWFKDFLPVDPSASNGRIKQLRSDQAFSHLPTGALQIESSEETDQGKYECVATNSAGVRYSSPANLYVRALLKLRRVAPRFSILPMSHEIMPGGNVNITCVAVGSPMPYVKWMQGAEDLTPEDDMPVGRNVLELTDVKDSANYTCVAMSSLGVIEAVAQITVKSLPKAPGTPMVTENTATSITITWDSGNPDPVSYYVIEYKSKSQDGPYQIKEDITTTRYSIGGLSPNSEYEIWVSAVNSIGQGPPSESVVTRTGEQAPASAPRNVQARMLSATTMIVQWEEPVEPNGLIRGYRVYYTMEPEHPVGNWQKHNVDDSLLTTVGSLLEDETYTVRVLAFTSVGDGPLSDPIQVKTQQGVPGQPMNLRAEARSETSITLSWSPPRQESIIKYELLFREGDHGREVGRTFDPTTSYVVEDLKPNTEYAFRLAARSPQGLGAFTPVVRQRTLQSKPSAPPQDVKCVSVRSTAILVSWRPPPPETHNGALVGYSVRYRPLGSEDPEPKEVNGIPPTTTQILLEALEKWTQYRITTVAHTEVGPGPESSPVVVRTDEDVPSAPPRKVEAEALNATAIRVLWRSPAPGRQHGQIRGYQVHYVRMEGAEARGPPRIKDVMLADAQWETDDTAEYEMVITNLQPETAYSITVAAYTMKGDGARSKPKVVVTKGAVLGRPTLSVQQTPEGSLLARWEPPAGTAEDQVLGYRLQFGREDSTPLATLEFPPSEDRYTASGVHKGATYVFRLAARSRGGLGEEAAEVLSIPEDTPRGHPQILEAAGNASAGTVLLRWLPPVPAERNGAIVKYTVAVREAGALGPARETELPAAAEPGAENALTLQGLKPDTAYDLQVRAHTRRGPGPFSPPVRYRTFLRDQVSPKNFKVKMIMKTSVLLSWEFPDNYNSPTPYKIQYNGLTLDVDGRTTKKLITHLKPHTFYNFVLTNRGSSLGGLQQTVTAWTAFNLLNGKPSVAPKPDADGFIMVYLPDGQSPVPVQSYFIVMVPLRKSRGGQFLTPLGSPEDMDLEELIQDISRLQRRSLRHSRQLEVPRPYIAARFSVLPPTFHPGDQKQYGGFDNRGLEPGHRYVLFVLAVLQKSEPTFAASPFSDPFQLDNPDPQPIVDGEEGLIWVIGPVLAVVFIICIVIAILLYKNKPDSKRKDSEPRTKCLLNNADLAPHHPKDPVEMRRINFQTPDSGLRSPLREPGFHFESMLSHPPIPIADMAEHTERLKANDSLKLSQEYESIDPGQQFTWEHSNLEVNKPKNRYANVIAYDHSRVILQPIEGIMGSDYINANYVDGYRCQNAYIATQGPLPETFGDFWRMVWEQRSATIVMMTRLEEKSRIKCDQYWPNRGTETYGFIQVTLLDTIELATFCVRTFSLHKNGSSEKREVRQFQFTAWPDHGVPEYPTPFLAFLRRVKTCNPPDAGPIVVHCSAGVGRTGCFIVIDAMLERIKPEKTVDVYGHVTLMRSQRNYMVQTEDQYSFIHEALLEAVGCGNTEVPARSLYAYIQKLAQVEPGEHVTGMELEFKRLANSKAHTSRFISANLPCNKFKNRLVNIMPYESTRVCLQPIRGVEGSDYINASFIDGYRQQKAYIATQGPLAETTEDFWRMLWENNSTIVVMLTKLREMGREKCHQYWPAERSARYQYFVVDPMAEYNMPQYILREFKVTDARDGQSRTVRQFQFTDWPEQGVPKSGEGFIDFIGQVHKTKEQFGQDGPISVHCSAGVGRTGVFITLSIVLERMRYEGVVDIFQTVKMLRTQRPAMVQTEDEYQFCYQAALEYLGSFDHYAT

SEQ ID NO: 72 - protein, 1913 aa, Homo sapiens
MVHVARLLLLLLTFFLRTDAETPPRFTRTPVDQTGVSGGVASFICQATGDPRPKIVWNKKGKKVSNQRFEVIEFDDGSGSVLRIQPLRTPRDEAIYECVASNNVGEISVSTRLTVLREDQIPRGFPTIDMGPQLKVVERTRTATMLCAASGNPDPEITWFKDFLPVDTSNNNGRIKQLRSGRVFKRLNRRALQIEQSEESDQGKYECVATNSAGTRYSAPANLYVRVETPQVRRVPPRFSIPPTNHEIMPGGSVNITCVAVGSPMPYVKWMLGAEDLTPEDDMPIGRNVLELNDVRQSANYTCVAMSTLGVIEAIAQITVKALPKPPGTPVVTESTATSITLTWDSGNPEPVSYYIIQHKPKNSEELYKEIDGVATTRYSVAGLSPYSDYEFRVVAVNNIGRGPPSEPVLTQTSEQAPSSAPRDVQARMLSSTTILVQWKEPEEPNGQIQGYRVYYTMDPTQHVNNWMKHNVADSQITTIGNLVPQKTYSVKVLAFTSIGDGPLSSDIQVITQTGVPGQPLNFKAEPESETSILLSWTPPRSDTIANYELVYKDGEHGEEQRITIEPGTSYRLQGLKPNSLYYFRLAARSPQGLGASTAEISARTMQSKPSAPPQDISCTSPSSTSILVSWQPPPVEKQNGIITEYSIKYTAVDGEDDKPHEILGIPSDTTKYLLEQLEKWTEYRITVTAHTDVGPGPESLSVLIRTNEDVPSGPPRKVEVEAVNSTSVKVSWRSPVPNKQHGQIRGYQVHYVRMENGEPKGQPMLKDVMLADAQWEFDDTTEHDMIISGLQPETSYSLTVTAYTTKGDGARSKPKLVSTTGAVPGKPRLVINHTQMNTALIQWHPPVDTFGPLQGYRLKFGRKDMEPLTTLEFSEKEDHFTATDIHKGASYVFRLSARNKVGFGEEMVKEISIPEEVPTGFPQNLHSEGTTSTSVQLSWQPPVLAERNGIITKYTLLYRDINIPLLPMEQLIVPADTTMTLTGLKPDTTYDVKVRAHTSKGPGPYSPSVQFRTLPVDQVFAKNFHVKAVMKTSVLLSWEIPENYNSAMPFKILYDDGKMVEEVDGRATQKLIVNLKPEKSYSFVLTNRGNSAGGLQHRVTAKTAPDVLRTKPAFIGKTNLDGMITVQLPEVPANENIKGYYIIIVPLKKSRGKFIKPWESPDEMELDELLKEISRKRRSIRYGREVELKPYIAAHFDVLPTEFTLGDDKHYGGFTNKQLQSGQEYVFFVLAVMEHAESKMYATSPYSDPVVSMDLDPQPITDEEEGLIWVVGPVLAVVFIICIVIAILLYKRKRAESDSRKSSIPNNKEIPSHHPTDPVELRRLNFQTPGMASHPPIPILELADHIERLKANDNLKFSQEYESIDPGQQFTWEHSNLEVNKPKNRYANVIAYDHSRVLLSAIEGIPGSDYVNANYIDGYRKQNAYIATQGSLPETFGDFWRMIWEQRSATVVMMTKLEERSRVKCDQYWPSRGTETHGLVQVTLLDTVELATYCVRTFALYKNGSSEKREVRQFQFTAWPDHGVPEHPTPFLAFLRRVKTCNPPDAGPMVVHCSAGVGRTGCFIVIDAMLERIKHEKTVDIYGHVTLMRAQRNYMVQTEDQYIFIHDALLEAVTCGNTEVPARNLYAYIQKLTQIETGENVTGMELEFKRLASSKAHTSRFISANLPCNKFKNRLVNIMPYESTRVCLQPIRGVEGSDYINASFIDGYRQQKAYIATQGPLAETTEDFWRMLWEHNSTIVVMLTKLREMGREKCHQYWPAERSARYQYFVVDPMAEYNMPQYILREFKVTDARDGQSRTVRQFQFTDWPEQGVPKSGEGFIDFIGQVHKTKEQFGQDGPISVHCSAGVGRTGVFITLSIVLERMRYEGVVDIFQTVKMLRTQRPAMVQTEDQYQFSYRAALEYLGSFDHYAT

SEQ ID NO: 73 - protein, 468 aa, Artificial Sequence [sequence omitted]

SEQ ID NO: 74 - protein, 456 aa, Artificial Sequence
  Viral polypeptide fused to mutated human sequence
MYSLFIILMGLPFSFQTSEPAYDKSVCDSNNKEYMGIEVYVEATLDEPLRQTTCESEIHKYGASVSNGGLNISVDLLNCFLNFHTVGVYTNRDTGVYTNRDTVYAKFASLDPSTEPINSMTHDDLVKLTEECIVDIYLKCEVDKTKDFMKNGNRLKPRDFKTVPPSNVGSMIELQSDYCVEDVTAYVKIYDECGNIKQHSIPTLRDYFTTKNGQPRKILKKKFDSCGSCDKTHTCPPCPAPELLGGPSVFLFPPKPKDTLMISRTPEVTCVVVDVSHEDPEVKFNWYVDGVEVHNAKTKPREEQYNSTYRVVSVLTVLHQDWLNGKEYKCKVSNKALPAPIEKTISKAKGQPREPQVYTLPPSRDELTKNQVSLTCLVKGFYPSDIAVEWESNGQPENNYKTTPPVLDSDGSFFLYSKLTVDKSRWQQGNVFSCSVMHEALHNHYTQKSLSLSPGK

SEQ ID NO: 75 - protein, 440 aa, Unknown
  Consensus sequence
LLIGSTSEPAYDKSVCDSNNKEYMGIEVYVEATLDEPLKQTTCESEIHKYGASVSNGGLNISVDLLNCFLNFHTVGVYTNRDTGVYTNRDTVYAKFASLDPSTEPINSMTHDDLVKLTEECIVDIYLKCEVDKTKDFMKNGNRLKPRDFKTVPPSNVGSMIELQSDYCVEDVTAYVKIYDECGNIKQHSIPTLRDYFTTKNGQPRKILKKKFDSCGKTHTCPPCPAPEGAPSVFLFPPKPKDTLMISRTPEVTCVVVDVSHEDPEVKFNWYVDGVEVHNAKTKPREEQYNSTYRVVSVLTVLHQDWLNGKEYKCKVSNKALPAPIEKTISKAKGQPREPQVYTLPPSRDELTKNQVSLTCLVKGFYPSDIAVEWESNGQPENNYKTTPPVLDSDGSFFLYSKLTVDKSRWQQGNVFSCSVMHEALHNHYTQKSLSLSPGK

SEQ ID NO: 76 - protein, 210 aa, Pox virus
TSEPAYDKSVCDSNNKEYMGIEVYVEATLDEPLKQTTCESEIHKYGASVSNGGLNISVDLLNCFLNFHTVGVYTNRDTGVYTNRDTVYAKFASLDPSTEPINSMTHDDLVKLTEECIVDIYLKCEVDKTKDFMKNGNRLKPRDFKTVPPSNVGSMIELQSDYCVEDVTAYVKIYDECGNIKQHSIPTLRDYFTTKNGQPRKILKKKFDSC

SEQ ID NO: 77 - protein, 226 aa, Artificial Sequence
  Mutated human sequence
KTHTCPPCPAPEAEGAPSVFLFPPKPKDTLMISRTPEVTCVVVDVSHEDPEVKFNWYVDGVEVHNAKTKPREEQYNSTYRVVSVLTVLHQDWLNGKEYKCKVSNKALPAPIEKTISKAKGQPREPQVYTLPPSRDELTKNQVSLTCLVKGFYPSDIAVEWESNGQPENNYKTTPPVLDSDGSFFLYSKLTVDKSRWQQGNVFSCSVMHEALHNHYTQKSLSLSPGK

SEQ ID NO: 78 - DNA, 678 bp, Artificial Sequence
  Mutated human sequence
aaaactcacacatgcccaccgtgcccagcacctgaagccgagggcgcgccgtcagtcttcctcttccccccaaaacccaaggacaccctcatgatctcccggacccctgaggtcacatgcgtggtggtggacgtgagccacgaagaccctgaggtcaagttcaactggtacgtggacggcgtggaggtgcataatgccaagacaaagccgcgggaggagcagtacaacagcacgtaccgtgtggtcagcgtcctcaccgtcctgcaccaggactggctgaatggcaaggagtacaagtgcaaggtctccaacaaagccctcccagcccccatcgagaaaaccatctccaaagccaaagggcagccccgagaaccacaggtgtacaccctgcccccatcccgggatgagctgaccaagaaccaggtcagcctgacctgcctggtcaaaggcttctatcccagcgacatcgccgtggagtgggagagcaatgggcagccggagaacaactacaagaccacgcctcccgtgctggactccgacggctccttcttcctctatagcaagctcaccgtggacaagagcaggtggcagcaggggaacgtcttctcatgctccgtgatgcatgaggctctgcacaaccactacacgcagaagagcctctccctgtctccgggtaaa

SEQ ID NO: 79 - protein, 228 aa, Homo sapiens
CDKTHTCPPCPAPELLGGPSVFLFPPKPKDTLMISRTPEVTCVVVDVSHEDPEVKFNWYVDGVEVHNAKTKPREEQYNSTYRVVSVLTVLHQDWLNGKEYKCKVSNKALPAPIEKTISKAKGQPREPQVYTLPPSRDELTKNQVSLTCLVKGFYPSDIAVEWESNGQPENNYKTTPPVLDSDGSFFLYSKLTVDKSRWQQGNVFSCSVMHEALHNHYTQKSLSLSPGK

SEQ ID NO: 80 - protein, 6 aa, Homo sapien
LLGGPS

SEQ ID NO: 81 - protein, 18 aa, Artificial
  Mutated human sequence
KTHTCPPCPAPEAEGAPS

SEQ ID NO: 82 - protein, 218 aa, Cowpox virus; identical to SEQ ID NO: 8

SEQ ID NO: 83 - protein, 210 aa, Pox Virus; identical to SEQ ID NO: 76

SEQ ID NO: 84 - protein, 226 aa, Pox virus
MYSLFIILMGLPFSFQTSEPAYDKSVCDSNNKEYMGIEVYVEATLDEPLKQTTCESEIHKYGASVSNGGLNISVDLLNCFLNFHTVGVYTNRDTGVYTNRDTVYAKFASLDPSTEPINSMTHDDLVKLTEECIVDIYLKCEVDKTKDFMKNGNRLKPRDFKTVPPSNVGSMIELQSDYCVEDVTAYVKIYDECGNIKQHSIPTLRDYFTTKNGQPRKILKKKFDSC

SEQ ID NO: 85 - protein, 186 aa, Yaba-like disease virus
MILLIFLCVVITNLSPSYCNEYINSTILVNIKLGKKTCCNGFTYLLDNNLEFYNIMYSNVNVSINIENCYFNNSIFKNTKHKNISILLTSKSNIQKNIAIIPITCKITIDITCTKNGKKKCLAQEKLPKTPNLIYKTAEHVNGIIDLNIYGSCVKYVYTRVNIYEISNGNLIYDQLDSNFLKLNTK

SEQ ID NO: 86 - protein, 58 aa, Unknown
  Consensus sequence
IILILPAYSIVITDILNISIINCFNKASIICIIICKLNKVIIDLNCVVVIYDNIISTK

SEQ ID NO: 87 - protein, 218 aa, Cowpox virus; identical to SEQ ID NO: 8

SEQ ID NO: 88 - protein, 218 aa, Variola major virus, strain Harvey; identical to SEQ ID NO: 1

SEQ ID NO: 89 - protein, 218 aa, Variola virus, strain India-1967; identical to SEQ ID NO: 2

SEQ ID NO: 90 - protein, 218 aa, Variola minor virus, strain Garcia-1966; identical to SEQ ID NO: 3

SEQ ID NO: 91 - protein, 219 aa, Vaccinia virus, strain WR; identical to SEQ ID NO: 4

SEQ ID NO: 92 - protein, 219 aa, Vaccinia virus, strain Tian Tan; identical to SEQ ID NO: 5

SEQ ID NO: 93 - protein, 219 aa, Vaccinia virus, strain Ankara; identical to SEQ ID NO: 6

SEQ ID NO: 94 - protein, 219 aa, Vaccinia virus, strain Copenhagen; identical to SEQ ID NO: 5

SEQ ID NO: 95 - protein, 218 aa, Cowpox Virus, Strain Brighton Red; identical to SEQ ID NO: 8

SEQ ID NO: 96 - DNA, 654 bp, Cowpox Virus, Strain Brighton Red; identical to SEQ ID NO: 9

SEQ ID NO: 97 - protein, 1445 aa, Homo sapiens; identical to SEQ ID NO: 22

SEQ ID NO: 98 - DNA, 7718 bp, Homo sapiens; identical to SEQ ID NO: 23

SEQ ID NO: 99 - protein, 1898 aa, Homo sapiens [sequence omitted]

SEQ ID NO: 100 - protein, 1907 aa, Homo sapiens; identical to SEQ ID NO: 25

SEQ ID NO: 101 - protein, 1888 aa, Homo sapiens; identical to SEQ ID NO: 26

SEQ ID NO: 102 - DNA, 7691 bp, Homo sapiens; identical to SEQ ID NO: 27

SEQ ID NO: 103 - protein, 1898 aa, Homo sapiens; identical to SEQ ID NO: 28

SEQ ID NO: 104 - protein, 1948 aa, Homo sapiens; identical to SEQ ID NO: 29

SEQ ID NO: 105 - DNA, 6500 bp, Homo sapiens; identical to SEQ ID NO: 30

SEQ ID NO: 106 - protein, 1910 aa, Homo sapiens; identical to SEQ ID NO: 31

SEQ ID NO: 107 - DNA, 6386 bp, Homo sapiens; identical to SEQ ID NO: 32

SEQ ID NO: 108 - protein, 1501 aa, Homo sapiens; identical to SEQ ID NO: 33

SEQ ID NO: 109 - DNA, 5159 bp, Homo sapiens; identical to SEQ ID NO: 34

SEQ ID NO: 110 - protein, 1505 aa, Homo sapiens; identical to SEQ ID NO: 35

SEQ ID NO: 111 - DNA, 5171 bp, Homo sapiens; identical to SEQ ID NO: 36

SEQ ID NO: 112 - protein, 1912 aa, Homo sapiens; identical to SEQ ID NO: 37

SEQ ID NO: 113 - DNA, 6263 bp, Homo sapiens; identical to SEQ ID NO: 38

SEQ ID NO: 114 - protein, 1899 aa, Homo sapiens; identical to SEQ ID NO: 39

SEQ ID NO: 115 - DNA, 246 bp, Homo sapiens; identical to SEQ ID NO: 40

SEQ ID NO: 116 - protein, 1903 aa, Homo sapiens; identical to SEQ ID NO: 41

SEQ ID NO: 117 - DNA, 6236 bp, Homo sapiens; identical to SEQ ID NO: 42

SEQ ID NO: 118 - protein, 1501 aa, Homo sapiens; identical to SEQ ID NO: 43

SEQ ID NO: 119 - DNA, 5030 bp, Homo sapiens; identical to SEQ ID NO: 44

SEQ ID NO: 120 - protein, 14 aa, Artificial Sequence
  RPTP sigma fragment
SIGQGPPSESVVTR

SEQ ID NO: 121 - protein, 22 aa, Artificial Sequence
  RPTP sigma fragment
HNVDDSLLTTVGSLLEDETYVR

SEQ ID NO: 122 - protein, 19 aa, Artificial Sequence
  RPTP sigma fragment
VLAFTSVGDGPLSDPIQVK

SEQ ID NO: 123 - protein, 15 aa, Artificial Sequence
  RPTP sigma fragment
TEVGPGPESSPVVVR

SEQ ID NO: 124 - protein, 16 aa, Artificial Sequence
  RPTP sigma fragment
WEPPAGTAEDQVLGYR

SEQ ID NO: 125 - protein, 20 aa, Artificial Sequence
  RPTP sigma fragment
TSVLLSWEFPDNYNSPTPYK

SEQ ID NO: 126 - protein, 15 aa, Artificial Sequence
  RPTP sigma fragment
TEVGPGPESSPVVVR

SEQ ID NO: 127 - protein, 15 aa, Artificial Sequence
  RPTP delta Ig domain
FEVIEFDDGSGSVLR

SEQ ID NO: 128 - protein, 16 aa, Artificial Sequence
  RPTP delta Ig domain
SGALQIEQSEESDQGK

SEQ ID NO: 129 - protein, 9 aa, Artificial Sequence
  RPTP delta Ig domain
YSAPANLYV

SEQ ID NO: 130 - protein, 18 aa, Artificial Sequence
  RPTP delta Ig domain
WMLGAEDLTPEDDMPIGR

SEQ ID NO: 131 - protein, 9 aa, Artificial Sequence
  RPTP delta Ig domain
NVLELNDVR

SEQ ID NO: 132 - protein, 21 aa, Artificial Sequence
  RPTP delta fragment
GPPSEPVLTQTSEQAPSSAPR

SEQ ID NO: 133 - protein, 15 aa, Artificial Sequence
  RPTP delta fragment
SPQGLGASTAEISAR

SEQ ID NO: 134 - protein, 23 aa, Artificial Sequence
  RPTP delta fragment
YTAVDGEDDKPHEILGIPSDTTK

SEQ ID NO: 135 - protein, 9 aa, Artificial Sequence
  RPTP delta fragment
VGFGEEMVK

SEQ ID NO: 136 - protein, 12 aa, Artificial Sequence
  RPTP delta fragment
GPGPYSPSVQFR

SEQ ID NO: 137 - protein, 8 aa, Artificial Sequence
  FLAG tag sequence
DYKDDDDK

SEQ ID NO: 138 - protein, 8 aa, Artificial Sequence
  XPRESS epitope tag
DLYDDDDK

SEQ ID NO: 139 - protein, 1948 aa, Homo sapiens; identical to SEQ ID NO: 29

SEQ ID NO: 140 - DNA, 6412 bp, Homo sapiens; identical to SEQ ID NO: 65

SEQ ID NO: 141 - protein, 8 aa, Artificial Sequence
  HA epitope
YPYDVDYA

SEQ ID NO: 142 - protein, 12 aa, Artificial Sequence
  Protein C tag
EDQVDPRLIDGK

SEQ ID NO: 143 - protein, 8 aa, Artificial Sequence
  HRV3C protease site
LEVLFQGP

SEQ ID NO: 144 - protein, 186 aa, Yaba-like disease virus; identical to SEQ ID NO: 85

SEQ ID NO: 145 - protein, 228 aa, Homo sapiens; identical to SEQ ID NO: 79

SEQ ID NO: 146 - protein, 226 aa, Artificial Sequence; identical to SEQ ID NO: 77
  Mutated mutein IgG Fc

SEQ ID NO: 147 - DNA, 678 bp, Artificial Sequence; identical to SEQ ID NO: 78
  Mutated mutein IgG Fc

SEQ ID NO: 148 - protein, 18 aa, Artificial Sequence
  Mutated mutein IgG Fc
KTHTCPPCPAPEAEGAPS

SEQ ID NO: 149 - protein, 394 aa, Artificial Sequence
  130L-mutein Fc fusion polypeptide
NEYINSTILVNIKLGKKTCCNGFTYLLDNNLEFYNIMYSNVNVSINIENCYFNNSIFKNTKHKNISILLTSKSNIQKNIAIIPITCKITIDITCTKNGKKKCLAQEKLPKTPNLIYKTAEHVNGIIDLNIYGSCVKYVYTRVNIYEISNGNLIYDQLDSNFLKLNTKSKTHTCPPCPAPEAEGAPSVFLFPPKPKDTLMISRTPEVTCVVVDVSHEDPEVKFNWYVDGVEVHNAKTKPREEQYNSTYRVVSVLTVLHQDWLNGKEYKCKVSNKALPAPIEKTISKAKGQPREPQVYTLPPSRDELTKNQVSLTCLVKGFYPSDIAVEWESNGQPENNYKTTPPVLDSDGSFFLYSKLTVDKSRWQQGNVFSCSVMHEALHNHYTQKSLSLSPGK

SEQ ID NO: 150 - protein, 167 aa, Yaba-like disease virus
NEYINSTILVNIKLGKKTCCNGFTYLLDNNLEFYNIMYSNVNVSINIENCYFNNSIFKNTKHKNISILLTSKSNIQKNIAIIPITCKITIDITCTKNGKKKCLAQEKLPKTPNLIYKTAEHVNGIIDLNIYGSCVKYVYTRVNIYEISNGNLIYDQLDSNFLKLNTK

SEQ ID NO: 151 - protein, 19 aa, Yaba-like disease virus
MILLIFLCVVITNLSPSYC

SEQ ID NO: 152 - protein, 6 aa, Homo sapiens
LLGGPS

SEQ ID NO: 153 - protein, 26 aa, Homo sapiens
MATGSRTSLLLAFGLLCLPWLQEGSA

SEQ ID NO: 154 - protein, 396 aa, Artificial Sequence
  130L-Fc fusion polypeptide
NEYINSTILVNIKLGKKTCCNGFTYLLDNNLEFYNIMYSNVNVSINIENCYFNNSIFKNTKHKNISILLTSKSNIQKNIAIIPITCKITIDITCTKNGKKKCLAQEKLPKTPNLIYKTAEHVNGIIDLNIYGSCVKYVYTRVNIYEISNGNLIYDQLDSNFLKLNTKSCDKTHTCPPCPAPELLGGPSVFLFPPKPKDTLMISRTPEVTCVVVDVSHEDPEVKFNWYVDGVEVHNAKTKPREEQYNSTYRVVSVLTVLHQDWLNGKEYKCKVSNKALPAPIEKTISKAKGQPREPQVYTLPPSRDELTKNQVSLTCLVKGFYPSDIAVEWESNGQPENNYKTTPPVLDSDGSFFLYSKLTVDKSRWQQGNVFSCSVMHEALHNHYTQKSLSLSPGK

SEQ ID NO: 155 - protein, 1898 aa, Homo sapiens
  VARIANT 600, 938, 1809: Xaa = Any Amino Acid
MAPEPAPGRRMVPLVPALVMLGLMAGAHGDSKPVFVKVPEDQTGLSEGVASFVCQATGEPKPRITWMKKGKKVSSQRFEVIEFDDGAGSVLRIQPLRVQRDEAIYECTATNSLGEINTSAKLSVLEEDQLPSGFPTIDMGPQLKVVEKGRTATMLCAAGGNPDPEISWFKDFLPVDPAASNGRIKQLRSGALQIESSEESDQGKYECVATNSAGTRYSAPANLYVRVRRVAPRFSIPPSSQEVMPGGSVNLTCVAVGAPMPYVKWMMGAEELTKEDEMPVGRNVLELSNVMRSANYTCVAISSLGMIEATAQVTVKALPKPPIDLVVTETTATSVTLTWDSGNTEPVSFYGIQYRAAGTDGPFQEVDGVASTRYSIGGLSPFSEYAFRVLAVNSIGRGPPSEAVRARTGEQAPSSPPRRVQARMLSASTMLVQWEPPEEPNGLVRGYRVYYTPDSRRPLSAWHKHNTDAGLLTTVGSLLPGVTYSLRVLAFTAVGDGPPSPTIQVKTQQGVPARSADFQANAESDTRIQLSWLLPPQERIVKYELVYWAAEDEGQQHKVTFDPTSSYTLEDLKPDTLYRFQLAARSDLGVGVFTPTVEAXTAQSTPSAPPQKVTCVSTGSTTVRVSWVPPPADSRNGIITQYSVAYEAVDGEDRKRHVVDGISREHSSWDLLGLEKWTEYRVWVRAHTDVGPGPESSPVLVRTDEDVPSGPPRKVEVEPLNSTAVHVSWKLPVPNKQHGQIRGYQVTYVRLENGEPRGQPIIQDVMLAEAQETTISGLTPETTYSITVAAYTTKGDGARSKPKVVTTTGAVPGRPTMMVSTTAMHTALLQWHPPKELPGELLGYRLQYRRADEARPNTIDFGKDDQHFTVTGLHKGATYVFRLAAKNRAGPGEEFEKEITTPEDVPSGFPQNLRVTGLTTSTTELTWDPPVLAERNGXITNYTVVYRDINSQLELQNVTNDTHLTLLGLKPDTTYDIKVRAHTSKGAGPLSPSIQSRTMPVEQVFTKNFRVAAAMKTSVLLSWEVPDSYKSAVPFKILYNGQSVEVDGHSMRKLIADLQPNTEYSFVLMNRGSSAGGLQHLVSIRTAPDLLPQKPLPASAFIEDGRFSLSMPQVQDPSLVRWFYIVVVPIDRVGGNLLAPRWNTPEELELDELLEAIEQGEEKQRRRRRQAERLKPYVAAQVDVLPDTFTLGDKKSYRGFYNRPLSPDLSYQCFVLASLKEPMDQKRYASSPYSDEIVVQVTPAQQQEEPEMLWVTGPVLAVILIILIVIAILLFKRKRTHSPSSKDEQSIGLKDSLLAHSSDPVEMRRLNYQTPGMRDHPPIPITDLADNIERLKANDGLKFSQEYESIDPGQQFTWENSNSEVNKPKNRYADVIAYDHSRVLLTSIDGVPGSDYINANYIDGYRKQNAYIATQGPLPETMGDFWRMVWEQRTATVVMMTRLEEKSRVKCDQYWPVRGTETYGLIQVTLVDTVELATYTMRTFALHKSGSSEKRELRQFQFMAWPDHGVPEYPTPILAFLRRVKACNPLDAGPMVVHCSAGVGRTGCFIVIDAMLERMKHEKTVDIYGHVTCMRSQRNYMVQTEDQYVFIHEALLEAAMCGHTEVLARNLYAHIQKLGQVPPGESVTAMELEFKLLANSKAHTSRFVSANLPCNKFKNRLVNIMPYELTRVCLQPIRGVEGSDYINASFLDGYRQQKAYIATQGPLAESTEDFWRMLWEHNSTIIVMLTKLREMGREKCHQYWPAERSARYQYFVVDPMAEYNMPQYILREFKVTDARDGQSRTIRQFQFTDWPEQGVPKTGEGFIDXIGQVHKTKEQFGQDGPITVHCSAGVGRTGVFITLSIVLERMRYEGVVDMFQTVKTLRTQRPAMVQTEDQYQLCYRAALEYLGSFDHYAT

SEQ ID NO: 156 - protein, 1907 aa, Homo sapiens
MAPTWSPSVVSVVGPVGLFLVLLARGCLAEEPPRFIREPKDQIGVSGGVASFVCQATGDPKPRVTWNKKGKKVNSQRFETIDFDESSGAVLRIQPLRTPRDENVYECVAQNSVGEITIHAKLTVLREDQLPPGFPNIDMGPQLKVVERTRTATMLCAASGNPDPEITWFKDFLPVDPSASNGRIKQLRSGALQIESSEETDQGKYECVATNSAGVRYSSPANLYVRVRRVAPRFSILPMSHEIMPGGNVNITCVAVGSPMPYVKWMQGAEDLTPEDDMPVGRNVLELTDVKDSANYTCVAMSSLGVIEAVAQITVKSLPKAPGTPVVTENTATSITVTWDSGNPDPVSYYVIEYKSKSQDGPYQIKEDITTTRYSIGGLSPNSEYEIWVSAVNSIGQGPPSESVVTRTGEQAPASAPRNVQARMLSATTMIVQWEEPVEPNGLIRGYRVYYTMEPEHPVGNWQKHNVDDSLLTTVGSLLEDETYTVRVLAFTSVGDGPLSDPIQVKTQQGVPGQPMNLRAEAKSETSIGLSWSAPRQESVIKYELLFREGDRGREVGRTFDPTTAFVVEDLKPNTEYAFRLAARSPQGLGAFTAVVRQRTLQAKPSAPPQDVKCTSLRSTAILVSWRPPPPETHNGALVGYSVRYRPLGSEDPDPKEVNNIPPTTTQILLEALEKWTEYRVTAVAYTEVGPGPESSPVVVRTDEDVPSAPPRKVEAEALNATAIRVLWRSPTPGRQHGQIRGYQVHYVRMEGAEARGPPRIKDIMLADAQEMVITNLQPETAYSITVAAYTMKGDGARSKPKVVVTKGAVLGRPTLSVQQTPEGSLLARWEPPADAAEDPVLGYRLQFGREDAAPATLELAAWERRFAAPAHKGATYVFRLAARGRAGLGEEAAAALSIPEDAPRGFPQILGAAGNVSAGSVLLRWLPPVPAERNGAIIKYTVSVREAGAPGPATETELAAAAQPGAETALTLRGLRPETAYELRVRAHTRRGPGPFSPPLRYRLARDPVSPKNFKVKMIMKTSVLLSWEFPDNYNSPTPYKIQYNGLTLDVDGRTTKKLITHLKPHTFYNFVLTNRGSSLGGLQQTVTARTAFNMLSGKPSVAPKPDNDGFIVVYLPDGQSPVTVQNYFIVMVPLRKSRGGQFPVLLGSPEDMDLEELIQDISRLQRRSLRHSRQLEVPRPYIAARFSILPAVFHPGNQKQYGGFDNRGLEPGHRYVLFVLAVLQKNEPTFAASPFSDPFQLDNPDPQPIVDGEEGLIWVIGPVLAVVFIICIVIAILLYKNKPDSKRKDSEPRTKCLLNNADLAPHHPKDPVEMRRINFQTPGMLSHPPIPITDMAEHMERLKANDSLKLSQEYESIDPGQQFTWEHSNLEANKPKNRYANVIAYDHSRVILQPLEGIMGSDYINANYVDGYRRQNAYIATQGPLPETFGDFWRMVWEQRSATVVMMTRLEEKSRIKCDQYWPNRGTETYGFIQVTLLDTMELATFCVRTFSLHKNGSSEKREVRHFQFTAWPDHGVPEYPTPFLAFLRRVKTCNPPDAGPIVVHCSAGVGRTGCFIVIDAMLERIKTEKTVDVYGHVTLMRSQRNYMVQTEDQYGFIHEALLEAVGCGNTEVPARSLYTYIQKLAQVEPGEHVTGMELEFKRLASSKAHTSRFITASLPCNKFKNRLVNILPYESSRVCLQPIRGVEGSDYINASFIDGYRQQKAYIATQGPLAETTEDFWRALWENNSTIVVMLTKLREMGREKCHQYWPAERSARYQYFVVDPMAEYNMPQYILREFKVTDARDGQSRTVRQFQFTDWPEQGAPKSGEGFIDFIGQVHKTKEQFGQDGPISVHCSAGVGRTGVFITLSIVLERMRYEGVVDIFQTVKVLRTQRPAMVQTEDEYQFCFQAALEYLGSFDHYAT

SEQ ID NO: 157 - protein, 1913 aa, Homo sapiens; identical to SEQ ID NO: 72

We claim the following:

1. An isolated antibody, or antigen-binding fragment thereof, (a) that specifically binds to at least two receptor-like protein tyrosine phosphatase (RPTP) polypeptides selected from (i) leukocyte common antigen-related protein (LAR); (ii) RPTP-σ; and (iii) RPTP-δ; and (b) that competitively inhibits binding of a poxvirus polypeptide to the at least two RPTP polypeptides.

2. An isolated antibody, or antigen-binding fragment thereof, that specifically binds to at least one receptor-like protein tyrosine phosphatase (RPTP) present on the cell surface of an immune cell, wherein the at least one RPTP is RPTP-σ or RPTP-δ, and wherein binding of the antibody, or antigen-binding fragment thereof, to the RPTP that is present on the cell surface of the immune cell suppresses immunoresponsiveness of the immune cell.

3. The antibody according to either claim 1 or 2, wherein the antibody is a polyclonal antibody or a monoclonal antibody.

4. The antigen-binding fragment according to either claim 1 or 2, wherein the antigen-binding fragment is selected from F(ab′)₂, Fab′, Fab, Fd, Fv, and single chain Fv (scFv).

5. The antibody according to either claim 1 or claim 2 wherein the poxvirus polypeptide is either A41L or Yaba-like Disease Virus 130L.

6. A bispecific antibody comprising (a) a first antigen-binding moiety that is capable of specifically binding to a receptor-like protein tyrosine phosphatase (RPTP), wherein the RPTP is selected from (i) leukocyte common antigen-related protein (LAR); (ii) RPTP-σ; and (iii) RPTP-δ; and (b) a second antigen-binding moiety that is capable of specifically binding to a RPTP, wherein the RPTP is selected from (i) leukocyte common antigen-related protein (LAR); (ii) RPTP-σ; and (iii) RPTP-δ, wherein the first antigen-binding moiety and the second antigen-binding moiety are different, and wherein the bispecific antibody suppresses immunoresponsiveness of an immune cell.

7. A fusion polypeptide comprising (a) an immunoglobulin-like domain 2 polypeptide of a first receptor-like protein tyrosine phosphatase (RPTP); (b) an immunoglobulin-like domain 3 polypeptide of a second RPTP; and (c) an immunoglobulin Fc polypeptide or mutein thereof, wherein each of the first RPTP and the second RPTP is selected from (i) leukocyte common antigen-related protein (LAR); (ii) RPTP-σ; and (iii) RPTP-δ, and wherein the first and second RPTP are the same or different.

8. The fusion polypeptide of claim 7 wherein the first RPTP and the second RPTP are the same.

9. The fusion polypeptide of claim 7 wherein the first RPTP is RPTP-σ and the second RPTP is RPTP-σ, and wherein the fusion polypeptide further comprises an immunoglobulin-like domain 1 polypeptide of RPTP-σ; or wherein the first RPTP is RPTP-δ and the second RPTP is RPTP-δ, and wherein the fusion polypeptide further comprises an immunoglobulin-like domain 1 polypeptide of RPTP-δ.

10. A composition comprising (a) at least one immunoglobulin-like domain 2 polypeptide of a first receptor-like protein tyrosine phosphatase (RPTP) and (b) at least one immunoglobulin-like domain 3 polypeptide of a second RPTP, wherein the first and second RPTP are the same or different and selected from (i) leukocyte common antigen-related protein (LAR); (ii) RPTP-σ; and (iii) RPTP-δ.

11. The composition of claim 10 wherein the first RPTP and the second RPTP are the same.

12. The composition of claim 10 wherein the first RPTP is RPTP-σ and the second RPTP is RPTP-σ, and wherein the composition further comprises an immunoglobulin-like domain 1 polypeptide of RPTP-σ; or wherein the first RPTP is RPTP-δ and the second RPTP is RPTP-δ, and wherein the composition further comprises an immunoglobulin-like domain 1 polypeptide of RPTP-δ.

13. A composition comprising a polypeptide dimer wherein the dimer comprises (a) a first monomer comprising an immunoglobulin-like domain 2 polypeptide and an immunoglobulin-like domain 3 polypeptide of a first receptor-like protein tyrosine phosphatase (RPTP); and (b) a second monomer comprising an immunoglobulin-like domain 2 polypeptide and an immunoglobulin-like domain 3 polypeptide of a second RPTP, wherein the first and second RPTP are the same or different and selected from (i) leukocyte common antigen-related protein (LAR); (ii) RPTP-σ; and (iii) RPTP-δ.

14. The composition of claim 13 wherein the first RPTP and the second RPTP are different.

15. The composition of claim 13 wherein the first RPTP and the second RPTP are the same.

16. The composition of claim 13 wherein the first monomer further comprises an immunoglobulin-like domain 1 of the first RPTP, and wherein the second monomer further comprises an immunoglobulin-like domain 1 of the second RPTP.

17. The composition according to claim 13 wherein the first monomer is fused to an immunoglobulin Fc polypeptide, and wherein the second monomer is fused to an immunoglobulin Fc polypeptide.

18. The composition of either claim 10 or claim 13 further comprising a pharmaceutically suitable excipient.

19. A fusion polypeptide comprising a poxvirus polypeptide fused with a mutein Fc polypeptide, wherein the mutein Fc polypeptide comprises the amino acid sequence of the Fc portion of a human IgG1 immunoglobulin comprising at least one mutation, wherein the at least one mutation is a substitution or a deletion of a cysteine residue in the hinge region, wherein the substituted or deleted cysteine residue is the cysteine residue most proximal to the amino terminus of the hinge region of a wildtype human IgG1 immunoglobulin Fc portion, and wherein the poxvirus polypeptide is capable of binding to a receptor-like protein tyrosine phosphatase (RPTP) selected from (i) leukocyte common antigen-related protein (LAR); (ii) RPTP-σ; and (iii) RPTP-δ.

20. The fusion polypeptide according to claim 19 wherein the mutein Fc polypeptide comprises at least one second mutation, wherein the at least one second mutation is a substitution of at least one amino acid in the CH2 domain such that the capability of the fusion polypeptide to bind to an IgG Fc receptor is reduced.

21. A composition comprising the fusion polypeptide according to claim 7 or claim 19 and a pharmaceutically suitable excipient.

22. A composition comprising (a) the antibody or antigen-binding fragment thereof, according to either claim 1 or 2, and (b) a pharmaceutically suitable excipient.

23. A composition comprising the bispecific antibody according to claim 6 and a pharmaceutically suitable excipient.

24. A method of suppressing an immune response in a subject comprising administering to the subject a composition according to claim 18.

25. A method of suppressing an immune response in a subject comprising administering to the subject a composition according to claim 21.

26. A method of suppressing an immune response in a subject comprising administering to the subject a composition according to claim 22.

27. A method of suppressing an immune response in a subject comprising administering to the subject a composition according to claim 23.

28. A method for treating an immunological disease or disorder in a subject comprising administering to the subject a composition according to claim 18.

29. A method for treating an immunological disease or disorder in a subject comprising administering to the subject a composition according to claim 21.

30. A method for treating an immunological disease or disorder in a subject comprising administering to the subject a composition according to claim 22.

31. A method for treating an immunological disease or disorder in a subject comprising administering to the subject a composition according to claim 23.

32. A method of manufacture for producing the antibody according to either claim 1 or 2.

33. A method of manufacture for producing the bispecific antibody according to claim 6.

34. A method of manufacture for producing the fusion polypeptide according to either claim 7 or 19.

35. A method of manufacture for producing the composition according to either claim 10 or claim 13.
